(19) United States
(12) Patent Application Publication
(10) Pub. No.: US 2012/0171191 A1
(43) Pub. Date: Jul. 5, 2012

(54) MEGANUCLEASE VARIANTS CLEAVING THE GENOME OF A PATHOGENIC NON-INTEGRATING VIRUS AND USES THEREOF

(75) Inventors: André Choulika, Paris (FR); Frédéric Cedrone, Paris (FR); Julianne Smith, Le Plessis Robinson (FR)

(73) Assignee: CELLECTIS, Paris (FR)

(21) Appl. No.: 13/322,266

(22) PCT Filed: May 26, 2010
(86) PCT No.: PCT/IB2010/052340

§ 371 Date: Mar. 19, 2012

(30) Foreign Application Priority Data
May 26, 2009 (IB) PCT/IB2009/006039
Sep. 24, 2009 (IB) PCT/IB2009/007171
Mar. 5, 2010 (IB) PCT/IB2010/050968

(51) Int. Cl. A61K 38/47; C12N 5/10; C12N 1/21; A01K 67/027; C12N 15/63; A61K 31/7088; C07H 21/04; C12N 9/16; C12N 1/19

(52) U.S. Cl. 424/94.6; 435/196; 435/358; 435/252.33; 435/254.2; 435/320.1; 514/44 R; 536/23.1; 536/23.2; 800/13

(57) ABSTRACT

An I-CreI variant, wherein at least one of the two 1-Cre1 monomers has at least two substitutions, one in each of the two functional subdomains of the LAGLIDADG core domain situated from positions 26 to 40 and 44 to 77 of I-CreI, said variant being able to cleave a DNA target sequence from the genome of a non-integrating virus, in particular herpes simplex virus (HSV) or Hepatitis B virus (HBV) for use in genome engineering and for in vivo and ex vivo (gene cell therapy) genome therapy as well as the treatment of a virus infection.

[0001] The invention relates to a meganuclease variant cleaving the genome of a non-integrating virus and in particular the genome of a Herpes Simplex Virus or Hepatitis B virus. The present invention also relates to a vector encoding said variant, as well as to a cell, animal or plant modified by this vector and to the use of these meganuclease variants and derived products for genome engineering and for in vivo and ex vivo (gene cell therapy) genome therapy as well as the treatment of a Herpesviridae infection or Hepadnaviridae infection.

[0002] Viral infections of various sorts are a serious and continuing health, agricultural and economic problem worldwide. In particular viruses present specific treatment and control problems as they always comprise an intracellular stage to their life cycle, in which the nucleic acid genome of the virus is inserted into a host cell and normally transported to the nucleus. During this stage of the virus life cycle, the virus genome can enter into a dormant state whilst inside a host cell, in which the production of new virus particles/proteins/copies of the viral genome ceases. These characteristics present a significant problem as most medicaments and treatments for viral infection consist of compounds which affect aspects of virus biology involved in the active stages of the virus life cycle, such as compounds which target a viral enzyme or structural protein. Therefore whilst in a dormant state the viral genome resident in the cytoplasm or nucleus of a host cell cannot be affected by most conventional anti-virus medicaments and therefore persists.

[0003] The present invention relates to viruses which do not integrate into the host genome following insertion of the viral genomic/genetic material into the host cell. That is the viral genetic material exists as an episomal/separate DNA molecule. Most important viruses exhibit such a life cycle, for example DNA ds (double stranded) viruses like Herpesviridae, Adenoviridae, Papovaviridae and Poxyiridae; DNA ss (single stranded) viruses like Parvoviridae and DNA ds viruses that replicate through a single stranded RNA intermediate such as Hepadnaviridae.

[0004] To illustrate the utility of the meganuclease variants according to the present invention, the inventors have worked to establish the effects of their invention upon two important pathogenic viruses Hepatitis B and Herpes Simplex Virus.

[0005] Hepatitis B, a virus of the family Hepadnaviridae, is an example of an epidemiologically important virus which following insertion of the virus genome into a host cell, then exists as an episomal DNA molecule separate from the host cell genome in the nucleus.

[0006] Infection with hepatitis B virus (HBV) is a world health problem, leading to more than 1 million deaths per year according to the World Health Organization. HBV is transmitted through infected blood, body fluids and by sexual intercourse.

[0007] HBV exhibits genetic variability with an estimated rate of 1.4 to 3.2×10⁻⁵ nucleotide substitutions per site per year. A large number of virus variants arise during replication as a result of nucleotide misincorporations, due to the absence of any proof reading capacity by the viral polymerase. This variability has resulted in well recognized subtypes of the virus (Schaefer, World J. Gastroenterol., 2007, 13:14-21).

[0008] HBV is an enveloped DNA-containing virus that replicates through an RNA intermediate. The infectious (“Dane”) particle consists of an inner core plus an outer surface coat (FIG. 81). The virus is a spherical particle with a diameter of 42 nm and is composed of an outer shell (or envelope) composed of several proteins known collectively as HBs which surrounds an inner protein shell, composed of HBc protein. Finally the HBc protein surrounds the viral DNA and the viral DNA polymerase.

[0009] The HBV virion genome is circular and approximately 3.2 kb in size and consists of DNA that is mostly double stranded. It comprises four overlapping open reading frames running in one direction and no non-coding regions. The four overlapping open reading frames (ORFs) in the genome are responsible for the transcription and expression of seven different HBV proteins. The four ORFs are known as C, S, P and X. The C ORF codes for the viral core protein and the e-antigen, the S ORF codes for three related viral envelope proteins, the P ORF codes for viral DNA polymerase and the X ORF codes for a 16.5 kDa protein whose function is not well defined (FIG. 82).

[0010] The C ORF is divided into the precore region and the core region by two in-frame initiating ATG codons. The hepatitis B virus core antigen (HBcAg) is initiated from the second ATG and thus contains only the core region. The virus core antigens associate to form the hepatitis B core that encapsulates HBV DNA and DNA polymerase. This protein has been shown to be essential for viral DNA replication. A second protein, the hepatitis B e-antigen (HBeAg) is initiated from the first ATG in the C ORF and thus consists of the pre-core and core region. This protein is targeted to the endoplasmic reticulum where it is cleaved at the N and C terminus and then secreted as a non-particulate HBeAg. This protein is not essential for viral replication and its function remains unknown. The S ORF encodes for three envelope proteins known as small (S), medium (M), and large (L) hepatitis B surface antigen. All three proteins contain the structural domain. The extra domain in M is known as pre-S2 while L contains the pre-S2 and pre-S1 domains. The pre-S1 domain is thought to be the substrate for the viral receptor on hepatocytes and thus essential for viral attachment and entry. All three envelope proteins are components of the infectious viral particles also referred to as Dane particles. However, the S protein by itself or associated with the larger envelope proteins have been shown to form spheres and filaments that are secreted from infected cells in at least 100-fold excess over infectious viral particles. It is thought that these spheres and filaments may serve to titrate out antibodies that are produced by the immune system and thus aid the infectious viral particles to escape the immune system. The P ORF codes for the viral DNA polymerase. This protein consists of two major domains tethered by an intervening spacer region. The amino-terminal domain plays a critical role in the packaging of pre-genomic RNA and in the priming of minus strand DNA while the carboxy-terminal domain is a reverse transcriptase that also has RNase H activity. This protein is essential for viral DNA replication. The X ORF encodes a protein that has been shown to be essential for virus replication in animals but dispensable for viral DNA synthesis in transfected tissue culture cells. It has been suggested that the X protein may play a role in transcriptional activation as well as stimulation of signal transduction pathways and regulation of apoptosis (Seeger and Mason, Microbiol. Mol. Biol. Rev., 2000, 51-68).

[0011] The viral genome consists of two partially overlapping DNA strands, called the − and + strands. The − strand is the larger of the two strands and is approximately 3.02 kb-3.32 kb in length and has a protein covalently attached to its 5′ end. The + strand, is approximately 1.7-2.8 kb in length and has an RNA oligonucleotide attached at its 5′ end.

[0012] The viral DNA is found in the nucleus soon after infection of the cell. The partially double-stranded DNA is rendered fully double-stranded by completion of the (+) sense strand and removal of the protein molecule from the (−) sense strand and a short sequence of RNA from the (+) sense strand and the ends are rejoined. This fully double-stranded DNA, a closed and circular DNA structure is known as cccDNA (covalently closed circular DNA).

[0013] HBV is a vaccine-preventable disease. Current vaccines are composed of the surface antigen of HBV and are produced by two different methods: plasma derived or recombinant DNA (Maupas et al, Lancet, 1976, 7974: 1367-1370; Mahoney, Clin. Microbiol. Rev., 1999, 12:351-366). However HBV vaccines are not available to all at risk individuals and/or are not always administered in the correct form and so cases of HBV infection persist throughout the world.

[0014] HBV infection can result in two distinct disease states, acute and chronic HBV infection. Acute HBV is the initial, rapid onset, short duration illness that results from infection with HBV. About 70% of adults with acute hepatitis B have few or no symptoms, while the remaining 30% develop significant symptoms (Seeger and Mason, Microbiol. Mol. Biol. Rev., 2000, 51-68). Rarely (in less than 1% of adults), individuals with acute hepatitis B can develop acute liver failure (fulminant hepatitis).

[0015] Chronic hepatitis B infection may take one of two forms: chronic persistent hepatitis, a condition characterized by persistence of HBV but in which liver damage is minimal; and chronic active hepatitis, in which there is aggressive destruction of liver tissue leading to cirrhosis and/or cancer such as hepatocellular carcinoma.

[0016] The prevalence of chronic HBV infection varies greatly in different parts of the world. Chronic HBV infection is highly endemic in developing regions with large populations such as South East Asia, China, sub-Saharan Africa and the Amazon Basin; moderately endemic in parts of Eastern and Southern Europe, the Middle East, Japan, and part of South America and low in most developed areas, such as North America, Northern and Western Europe and Australia.

[0017] When HBV infection results in a chronic disease, this cannot currently be cured. Therefore the goal of therapy is the long-term suppression of viral replication, as this is associated with a reduced risk of the development of advanced liver disease including liver cirrhosis and cancer. There are currently two major families of drugs that have been approved for the treatment of chronic Hepatitis B infections, interferons, which boost the immune system in order to eliminate or diminish the virus, and nucleoside/nucleotide analogues, which inhibit viral replication. As all treatments for Hepatitis B infections are administered overlong periods of time, one of the major problems is the development of drug resistance. This is particularly the case for nucleoside/nucleotide analogues for which there are a growing number of documented viral polymerase mutants that result in drug resistance (Tillman, World J. Gastroenterol., 2007, 13:125-140).

[0018] Liver transplantation is the only long term treatment available for patients with liver failure. However, liver transplantation is complicated by the risk of recurrent hepatitis B infection in patients where the initial liver failure was due to hepatitis B infection or who have a chronic HBV infection or a high risk of HBV reinfection; this problem significantly impairs graft and patient survival. In the absence of treatment, HBV reinfection occurs in 75%-80% of persons who undergo liver transplantation.

[0019] Therefore in the prior art significant problems exist with treating patients who are chronically infected with HBV and more specifically with reducing the HBV viral titer as far as possible in a patient who requires a liver transplant.

[0020] A promising target for the development of treatments for HBV infection and more generally non-integrating viruses is the intracellular episomal HBV/NIV (Non Integrating Virus) genome. The intracellular HBV genome is the molecular basis of HBV persistence. It has been found in both animal models and clinical investigations that cccDNA persists even after years of antiviral therapy and is responsible for the rapid increases in viral titer following withdrawal of treatment or the development of resistance.

[0021] It has been proposed (WO 2008/119000, Iowa University) that the intracellular genome of HBV could be targeted and potentially inactivated using a variety of methods such as via RNA interference (RNAi), short interfering RNA (siRNA) and engineered polydactyl zinc finger protein domains in combination with cleavage domains generated against a target(s) in the HBV genome. To date however none of these methods have been shown able to specifically target and/or affect the HBV virus.

[0022] Potential problems exist with all of these proposed mechanisms, for instance although it appears that RNAi can suppress virtually all classes of DNA and RNA virus against which they have been tested (Dykxhoorn, D M and Lieberman, J (2006). PLoS Med3: e242 and Leonard, T N and Schaffer, D V (2006). Gene Ther 13: 532-540.), clinical studies are increasingly showing that viruses are able to elude the effects of RNAi (Gitlin, L, Karelsky, S and Andino, R (2002). Nature 418: 430-434 and Gitlin, L, Stone, J K and Andino, R (2005). J Virol 79: 1027-1035) with apparent ease.

[0023] Likewise in theory zinc finger domains could be generated which are specific to targets in the HBV genome and therefore Zinc finger nucleases (ZFNs), which are chimeric proteins composed of a ‘specific’ zinc finger DNA-binding domain linked to a non-specific DNA-cleavage domain, could be generated to a target in the HBV genome. Such ZFNs would not be useful as in general ZFNs are known to be highly cytotoxic (Porteus M H, Baltimore D (2003) Science 300: 763 and Beumer K, Bhattacharyya G, Bibikova M, Trautman J K, Carroll D (2006) Genetics 172: 2391-2403.) due to their cleavage of non-target sequences, leading to genome degradation. Although various steps have been attempted to attenuate these cytotoxic effects thus far ZFNs remain simply too toxic for routine use. The generation of such ZFNs is also a laborsome endeavour as the combination of a given zinc finger domain, following its generation, with a nuclease domain requires a substantial amount of work to ensure firstly that the combination is functional and secondly specific.

[0024] Another important group of non-integrating pathogenic viruses are from the family Herpesviridae. Of the more than 100 known Herpesviridae viruses, only 8 routinely infect humans: herpes simplex virus types 1 and 2, varicella-zoster virus, cytomegalovirus, Epstein-Barr virus, human herpes virus 6 (variants A and B), human herpes virus 7, Kaposi's sarcoma virus and human herpes virus 8. A simian virus, called B virus, occasionally infects humans. All herpes viruses can establish latent infection within specific tissues, which are characteristic for each virus (Medical Microbiology, 4^{th} Edition, Virology, Herpes viruses, Whitley R J, 1996).

[0025] Herpes viruses infect members of all groups of vertebrates, as well as some invertebrates. Herpes viruses have been typically classified into three groups based upon details of tissue tropism, pathogenicity and viral behaviour under conditions of culture in the laboratory. The three types include: the alpha-herpes viruses which are neurotropic, have a rapid replication cycle and a broad host and cell range; and the beta- and gamma-herpes viruses which differ in genome size and structure but which both replicate more slowly and in a much more restricted range of cells of glandular and/or lymphatic origin. To date, eight discrete human herpes viruses have been described; each causing a characteristic disease (Norberg et al, J Clin Microbiol, 2006, 44, 4511-4514).

[0026] Herpes simplex virus types 1 and 2 (HSV-1 and −2) will be used to illustrate the problems presented by Herpesviridae viruses. In the present patent application references to Herpes Simplex Virus and/or HSV refer to both HSV-1 and HSV-2. HSV-1 and HSV-2 are the primary agents of recurrent facial and genital herpetic lesions. Infections although mild in terms of the severity of symptoms, can lead to significant psychological trauma. They are also a major cause of encephalitis. Herpes simplex virus −1/−2 are highly adapted human pathogens with a rapid lytic replication cycle and also exhibit the ability to invade sensory neurons without showing any cytopathology. Latent infections are subject to reactivation whereby infectious virus can be recovered in peripheral tissue enervated by the latently infected neurons following a specific physiological stress. A major factor in these “switches” from lytic to latent infection and back involves changes in transcription patterns, mainly as a result of the interaction between viral promoters, the viral genome and cellular transcriptional machinery.

[0027] HSV is a nuclear replicating DNA virus. The HSV envelope contains at least 8 glycoproteins. The capsid itself is made up of 6 proteins. The major one is the capsid protein U_{L}19. The matrix which contacts both the envelope and the capsid contains at least 15-20 proteins.

[0028] The HSV-1 genome is a linear, double stranded DNA duplex 152,261 base pairs (bp) in length, and with a base composition of 68% G+C which circularizes upon infection. The virus encodes nearly 100 transcripts and more than 70 open translational reading frames (ORFs). Most ORFs are expressed by a single transcript. About 40 genes are considered as essential for virus replication in culture and these are listed in Table I below.

| | | Required for | |
|---|---|---|---|
| | | replication in | |
| Name | kinetics | culture? | Function |
| “a” | — | Yes | cis genome cleavage, packaging signal |
| TR_{L} | — | Yes | Terminal Long Repeat |
| gL (U_{L}1) | early | Yes | viral entry, associates with gH-polyadenylation usage changes with time |
| Helicase | early | Yes | DNA replication |
| (U_{L}5) | | | |
| U_{L}6 | late | Yes | capsid protein, capsid maturation, DNA packaging |
| Helicase/Primase | early | Yes | DNA replication |
| (UL8) | | | |
| a0 | IE | Yes | immediate-early transcription regulator (mRNA spliced) |
| Ori binding | early | Yes | DNA replication |
| protein | | | |
| (U_{L}9) | | | |
| U_{L}11 | late | Yes | tegument protein, capsid egress and envelopement |
| Alkaline | early | Yes | DNA packaging, capsid egress |
| exonuclease | | | |
| (U_{L}12) | | | |
| U_{L}15 | late | Yes | DNA packaging, cleavage of replicating DNA, spliced mRNA |
| U_{L}17 | late | Yes | cleavage and packaging of DNA |
| Capsid | late | Yes | Triplex |
| (U_{L}18) | | | |
| Capsid | late | Yes | major capsid protein, hexon |
| (U_{L}19) | | | |
| U_{L}20 | late | Yes | membrane associated, virion egress |
| gH (U_{L}22) | late | Yes | viral entry, functions with gL |
| U_{L}25 | late | Yes | tegument protein, capsid maturation, DNA packaging |
| U_{L}26 | early | Yes | Maturational protease |
| U_{L}26.5 | early | Yes | Scaffolding protein |
| gB (U_{L}27) | early | Yes | Glycoprotein required for virus entry |
| U_{L}28 | early | Yes | capsid maturation, DNA packaging |
| U_{L}29 | early | Yes | single-stranded DNA binding protein, DNA replication |
| DNA pol | early | Yes | DNA replication |
| (UL30) | | | |
| U_{L}32 | late | Yes | capsid maturation, DNA packaging |
| _{L}33 | late | Yes | capsid maturation, DNA packaging |
| U_{L}35 | late | Yes | capsid protein, capsomer tips |
| U_{L}38 | late | Yes | Capsid protein, triplex |
| U_{L}39 | early | Yes | Large subunit ribonucleotide reductase |
| U_{L}40 | early | Yes | Small subunit ribonucleotide reductase |
| U_{L}42 | late | Yes | Polymerase accessory protein, DNA replication |
| a-TIF | — | Yes | virion-associated transcriptional activator, enhances immediate-early |
| (UL48) | | | transcription through cellular Oct-1 and CTF binding at “TATGARAT” sites |
| Helicase/primase | early | Yes | DNA replication |
| (UL52) | | | |
| a27 (UL54) | immediate- | Yes | Immediate-early regulatory protein, inhibits splicing |
| IR_{L} | — | Yes | Internal Long Repeat |
| R_{L}/R_{S} | — | Yes | Joint region, contains “a” sequences |
| Junction | | | |
| IR_{S} | — | Yes | Internal Short Repeat |
| a4 | Immediate- | Yes | immediate-early transcriptional activator |
| Ori_{S} | — | Yes | Origin of replication |
| gD (U_{S}6) | late | Yes | virus entry, binds HSV4EM |
| TR_{S} | — | Yes | Terminal Short Repeat |
| “a” | — | Yes | cis genome cleavage, packaging signal |

[0029] The HSV-1 genome is divided into six important regions (FIG. 1): 1) the ends of the linear molecules, the “a” sequences: these are important in both circularization of the viral DNA, and in packaging the DNA in the virion; 2) the 9,000 by long repeat (R_{L}), which encode both an important immediate early regulatory protein (a0) and the promoter of most of the “gene” for the latency associated transcript (LAT); (3) the long unique region (U_{L}), which is 108,000 bp long, encodes at least 56 distinct proteins (actually more because some ORFs are spliced and expressed in redundant ways); it contains genes for the DNA replication enzymes and the capsid proteins, as well as many other proteins; 4) the 6,600 bp short repeats (R_{S}) encode the very important “a” immediate early protein; this is a very powerful transcriptional activator which acts along with a0/ICP0 and a27 (ICP27/UL54) (in the U_{L}) to stimulate the infected cell for all viral gene expression that leads to viral DNA replication; 5) the origins of replication: the ori_{L} is in the middle of the U_{L} region; the ori_{S} is in the R_{S} and thus, is present in two copies. All sets of ori's operate during infection to give a very complicated replication complex, very similar to that seen in the replication of phage T4; 6) the 13,000 bp unique short region (U_{S}) encodes 12 ORFs, a number of which are glycoproteins important in viral host range and response to host defence.

[0030] Five HSV-1 genes (a4 or ICP4, a0 or ICP0, a27 or ICP27/U_{L} 54, a22 or ICP22/U_{S}1, and a47 or ICP47/U_{S}12) are expressed and function at the earliest stages of the productive infection cycle. The “immediate-early” or “a” phase of gene expression is mediated by the action of α-TIF through its interaction with cellular transcription factors at specific enhancer elements associated with the individual a-transcript promoters. Activation of the host cell transcriptional machinery by the action of “a” gene products, results in the expression of the “early” or “b” genes. Seven of these are necessary and sufficient for viral DNA replication under all conditions: DNA polymerase (U_{L}30), DNA binding proteins (U_{L}42 and U_{L}29 or ICP8), ORI binding protein (U_{L}9), and the helicase/primase complex (U₁,5, 8, and 52). When sufficient levels of these proteins have accumulated within the infected cell, viral DNA replication ensues. Accessory or “non-essential” proteins for virus replication can be substituted for their function by one or another proteins.

[0031] HSV can adopt two different post-infection phenotypes: (i) productive infection or (ii) latent infection. The most recent models posit that when viral DNA migrates to nuclear pods, which are PML-associated subnuclear structures, it is either circularized by cellular DNA repair enzymes acting on the “a” sequences or remains linear through the action of the immediate-early ICP0 protein, which inhibits cellular DNA repair. In the former case, latent infection ensues while in the latter, productive replication takes place.

[0032] The vegetative replication of viral DNA which occurs during productive infection, represents a critical and central event in the viral replication cycle. High level of DNA replication irreversibly drives a cell to producing virus, which eventually results in its destruction. DNA replication also has a significant influence on viral gene expression. Early expression is significantly reduced or shut off following the start of DNA replication, while late genes begin to be expressed at high levels.

[0033] In a latent infection the viral genome is maintained intact in specific sensory neurons where it is genetically equivalent to that present in the viral particle, but the highly regulated productive cycle cascade of gene expression, so characteristic of herpes virus infections, does not occur. As a consequence, any transcription during latent infection with most herpes viruses is from a very restricted portion of the viral genome, and this transcription is important in some aspect of the process itself. During the latent phase, productive cycle genes are generally transcriptionally and functionally quiescent and only the latency associated transcript (LAT) is expressed. The promoter for the LAT contains neuron-specific cis-acting elements. The maintenance of the HSV genome in latently infected neurons requires no viral gene expression. HSV DNA is maintained as a nucleosomal, circular episome in latent infections and low levels of genome replication may occur or be necessary for the establishment or maintenance of a latent infection from which virus can be efficiently reactivated. The process of reactivation from latency is triggered by stress as well as other signals which are thought to transiently lead to increased transcriptional activity in the harboring neuron. The sensory nerve ganglia survive repeated reactivation without losing function. It appears to also occur without either extensive cytopathology associated with normal vegetative viral replication or with the death of only a very few cells. This process may be augmented by viral genes known to interfere with apoptosis, such as ICP34.5, which act to prevent neuronal death during reactivation where limited replication occurs (Maryam Ahmed et al., J. Virol. 2002 January; 76(2): 717-729. doi: 10.1128/JVI.76.2.717-729.2002.; Guey-Chuen Perng et al., J. Virol. 2002 February; 76(3): 1224-1235. doi: 10.1128/JVI.76.3.1224-1235.2002; Ling Jin et al., J. Virol. 2005 October; 79(19): 12286-12295. doi: 10.1128/JVI.79.19.12286-12295.2005).

[0034] To date, HSV treatments have been limited to antiviral substances that can reduce the level of infection by reducing the level of virus proliferation during vegetative infection. However, such antiviral substances have no effect on quiescent virus during the latency phase.

[0035] Other possible treatments which have been investigated include improving the immune response so as to keep the number of viral particles below the proliferation limit and so make episodes of virus replication of less severity, duration or asymptomatic. Some clinical trials are currently running for vaccines but the question of their efficiency on quiescent HSV is still uncertain. (Clin Vaccine Immunol. 2008 November; 15 (11):1638-43; Pediatric Research, 2001, 49:4; Curr Pharm Des. 2007; 13(19):1975-88)

[0036] The inventors seeing these problems with prior art approaches to treating virus infections, in particular the persistence of dormant copies of the virus genome, have now developed a new set of materials which target the otherwise stable episomal virus genome in situ within the nucleus or cytoplasm of an infected cell. The inventors have validated their work using the important diseases hepatitis B and Herpes Simplex Virus and have generated several meganuclease variants which can effectively recognize and cleave different targets in the HBV/HSV episomal genome leading to the cleavage and elimination or inactivation of the copies of the virus genome that allow the virus to persist.

[0037] In the wild, meganucleases are essentially represented by homing endonucleases. Homing Endonucleases (HEs) are a widespread family of natural meganucleases including hundreds of proteins families (Chevalier, B. S, and B. L. Stoddard, Nucleic Acids Res., 2001, 29, 3757-3774). These proteins are encoded by mobile genetic elements which propagate by a process called “homing”: the endonuclease cleaves a cognate allele from which the mobile element is absent, thereby stimulating a homologous recombination event that duplicates the mobile DNA into the recipient locus. Given their exceptional cleavage properties in terms of efficacy and specificity, they could represent ideal scaffolds to derive novel, highly specific endonucleases.

[0038] HEs belong to four major families. The LAGLIDADG family, named after a conserved peptidic motif involved in the catalytic center, is the most widespread and the best characterized group. Seven structures are now available. Whereas most proteins from this family are monomeric and display two LAGLIDADG motifs, a few have only one motif, and thus dimerize to cleave palindromic or pseudo-palindromic target sequences.

[0039] Although the LAGLIDADG peptide is the only conserved region among members of the family, these proteins share a very similar architecture (FIG. 34). The catalytic core is flanked by two DNA-binding domains with a perfect two-fold symmetry for homodimers such as I-CreI (Chevalier, et al., Nat. Struct. Biol., 2001, 8, 312-316), I-MsoI (Chevalier et al., J. Mol. Biol., 2003, 329, 253-269) and I-CeuI (Spiegel et al., Structure, 2006, 14, 869-880) and with a pseudo symmetry for monomers such as I-SceI (Moure et al., J. Mol. Biol., 2003, 334, 685-69, I-DmoI (Silva et al., J. Mol. Biol., 1999, 286, 1123-1136) or I-AniI (Bolduc et al., Genes Dev., 2003, 17, 2875-2888). Both monomers and both domains (for monomeric proteins) contribute to the catalytic core, organized around divalent cations. Just above the catalytic core, the two LAGLIDADG peptides also play an essential role in the dimerization interface. DNA binding depends on two typical saddle-shaped αββαββα folds, sitting on the DNA major groove. Other domains can be found, for example in inteins such as PI-PfuI (Ichiyanagi et al., J. Mol. Biol., 2000, 300, 889-901) and PI-SceI (Moure et al., Nat. Struct. Biol., 2002, 9, 764-770), whose protein splicing domain is also involved in DNA binding.

[0040] The making of functional chimeric meganucleases, by fusing the N-terminal I-DmoI domain with an I-CreI monomer (Chevalier et al., Mol. Cell., 2002, 10, 895-905; Epinat et al., Nucleic Acids Res, 2003, 31, 2952-62; International PCT Application WO 03/078619 (Cellectis) and WO 2004/031346 (Fred Hutchinson Cancer Research Center, Stoddard et al)) have demonstrated the plasticity of LAGLIDADG proteins.

[0041] Different groups have also used a semi-rational approach to locally alter the specificity of the I-CreI (Seligman et al., Genetics, 1997, 147, 1653-1664; Sussman et al., J. Mol. Biol., 2004, 342, 31-41; International PCT Applications WO 2006/097784, WO 2006/097853, WO 2007/060495 and WO 2007/049156 (Cellectis); Arnould et al., J. Mol. Biol., 2006, 355, 443-458; Rosen et al., Nucleic Acids Res., 2006, 34, 4791-4800; Smith et al., Nucleic Acids Res., 2006, 34, e149), I-SeeI (Doyon et al., J. Am. Chem. Soc., 2006, 128, 2477-2484), PI-SceI (Gimble et al., J. Mol. Biol., 2003, 334, 993-1008) and I-MsoI (Ashworth et al., Nature, 2006, 441, 656-659).

[0042] In addition, hundreds of I-CreI derivatives with locally altered specificity were engineered by combining the semi-rational approach and High Throughput Screening:
[0043] Residues Q44, R68 and R70 or Q44, R68, D75 and 177 of I-CreI were mutagenized and a collection of variants with altered specificity at positions ±3 to 5 of the DNA target (5NNN DNA target) were identified by screening (International PCT Applications WO 2006/097784 and WO 2006/097853 (Cellectis); Arnould et al., J. Mol. Biol., 2006, 355, 443-458; Smith et al., Nucleic Acids Res., 2006, 34, e149).
[0044] Residues K28, N30 and Q38 or N30, Y33 and Q38 or K28, Y33, Q38 and S40 of I-CreI were mutagenized and a collection of variants with altered specificity at positions ±8 to 10 of the DNA target (10 NNN DNA target) were identified by screening (Smith et al., Nucleic Acids Res., 2006, 34, e149; International PCT Applications WO 2007/060495 and WO 2007/049156 (Cellectis)).

[0045] Two different variants were combined and assembled in a functional heterodimeric endonuclease able to cleave a chimeric target resulting from the fusion of two different halves of each variant DNA target sequence (Arnould et al., precited; International PCT Applications WO 2006/097854 and WO 2007/034262).

[0046] Furthermore, residues 28 to 40 and 44 to 77 of I-CreI were shown to form two separable functional subdomains, able to bind distinct parts of a homing endonuclease target half-site (Smith et al. Nucleic Acids Res., 2006, 34, e149; International PCT Applications WO 2007/049095 and WO 2007/057781 (Cellectis)).

[0047] The combination of mutations from the two subdomains of I-CreI within the same monomer allowed the design of novel chimeric molecules (homodimers) able to cleave a palindromic combined DNA target sequence comprising the nucleotides at positions ±3 to 5 and ±8 to 10 which are bound by each subdomain (Smith et al., Nucleic Acids Res., 2006, 34, e149; International PCT Applications WO 2007/049095 and WO 2007/057781 (Cellectis)).

[0048] The method for producing meganuclease variants and the assays based on cleavage-induced recombination in mammal or yeast cells, which are used for screening variants with altered specificity are described in the International PCT Application WO 2004/067736; Epinat et al., Nucleic Acids Res., 2003, 31, 2952-2962; Chames et al., Nucleic Acids Res., 2005, 33, e178, and Arnould et al., J. Mol. Biol., 2006, 355, 443-458. These assays result in a functional LacZ reporter gene which can be monitored by standard methods.

[0049] The combination of the two former steps allows a larger combinatorial approach, involving four different subdomains. The different subdomains can be modified separately and combined to obtain an entirely redesigned meganuclease variant (heterodimer or single-chain molecule) with chosen specificity. In a first step, couples of novel meganucleases are combined in new molecules (“half-meganucleases”) cleaving palindromic targets derived from the target one wants to cleave. Then, the combination of such “half-meganucleases” can result in a heterodimeric species cleaving the target of interest. The assembly of four sets of mutations into heterodimeric endonucleases cleaving a model target sequence or a sequence from different genes has been described in the following Cellectis International patent applications: XPC gene (WO2007/093918), RAG gene (WO2008/010093), HPRT gene (WO2008/059382), beta-2 microglobulin gene (WO2008/102274), Rosa26 gene (WO2008/152523), Human hemoglobin beta gene (WO2009/13622) and Human interleukin-2 receptor gamma chain gene (WO2009019614).

[0050] These variants can be used to cleave genuine chromosomal sequences and have paved the way for novel perspectives in several fields, including gene therapy.

[0051] Even though the base-pairs ±1 and ±2 do not display any contact with the protein, it has been shown that these positions are not devoid of content information (Chevalier et al., J. Mol. Biol., 2003, 329, 253-269), especially for the base-pair ±1 and could be a source of additional substrate specificity (Argast et al., J. Mol. Biol., 1998, 280, 345-353; Jurica et al., Mol. Cell., 1998, 2, 469-476; Chevalier et al. Nucleic Acids Res., 2001, 29, 3757-3774). In vitro selection of cleavable I-CreI targets (Argast et al., precited) randomly mutagenized, revealed the importance of these four base-pairs on protein binding and cleavage activity. It has been suggested that the network of ordered water molecules found in the active site was important for positioning the DNA target (Chevalier et al., Biochemistry, 2004, 43, 14015-14026). In addition, the extensive conformational changes that appear in this region upon ICreI binding suggest that the four central nucleotides could contribute to the substrate specificity, possibly by sequence dependent conformational preferences (Chevalier et al., 2003, precited).

[0052] The inventors of the present invention have developed a new approach and have created a new type of non-integrating virus agent which can target and eliminate the virus whilst it is inside a target cell by targeting the viral genome with one or more highly specific DNA restriction enzyme. Such highly specific DNA restriction enzymes recognizing specific viral sequences could act on proliferating virus as well as on latent viral DNA.

[0053] These materials can be used to manipulate the virus genome so as to elucidate aspects of virus biology and/or as a medicament to directly target and eliminate virus genomic material from the nuclei of infected cells.

[0054] According to a first aspect of the present invention there is provided an I-CreI variant which cleaves a DNA target in the genome of a pathogenic non-integrating virus (NIV), for use in treating an infection of said NIV.

[0055] The inventors have therefore created a new class of meganuclease based reagents which are useful for studying a NIV in vitro and in vivo; this class of reagents also represent a potential new class of anti-NIV medicament, which instead of acting upon the virion or any component thereof, acts upon the intracellular genomic of the virus.

[0056] To validate their invention, the Inventors have identified a series of DNA targets in the genome of the Herpesviridae Virus Herpes Simplex Virus (HSV), that are cleaved by I-CreI variants (Table II to VIII and FIGS. 3, 24 and 49-52) and in the genome of the NIV hepatitis B virus (HBV), that are cleaved by I-CreI variants (FIGS. 55, 62, 70 and 84).

[0057] Target sequences can be chosen from one or more regions of the virus genome, for instance in the coding sequence of a virus gene and in particular in a gene (s) which is essential for the virus. In the present patent application essential genes are those genes which must remain active in order for the virus to be able to direct the manufacture and assembly of further virus particles which are able to exit the host cell and infect further cells. In addition to essential genes, other types of essential genetic elements can exist such as the regulatory elements of essential genes and/or structural sequence elements of the virus genome that are necessary for its packaging. For instance if the structure of the virus genetic material can be disrupted for instance by linearization or a strand break, this could make the viral genome susceptible to degradation by the innate anti-viral in vivo systems such as nuclease digestion.

[0058] For most viruses the majority of genes encoded by the virus are essential and hence inactivation of one or more of these viral genes either directly for instance by a truncation event or indirectly by for instance interrupting a regulatory sequence prevents this virus genome from producing further infective virus particles.

[0059] In particular the NIV is a virus from a family selected from the group comprising: Herpesviridae, Adenoviridae, Papovaviridae, Poxyiridae, Parvoviridae, Hepadnaviridae.

[0060] In particular the NIV is selected from the group comprising: herpes simplex virus 1, herpes simplex virus 2, herpes simplex virus 3, Varicella zoster virus, Epstein-Barr virus, Cytomegalovirus, Herpes lymphotropic virus, Roseolovirus, Rhadinovirus, Adenovirus, Papillomavirus, Polyomavirus, variola virus, vaccinia virus, cowpox virus, monkeypox virus, camel pox, variola virus, vaccinia virus, cowpox virus, monkeypox virus, tanapox virus, yaba monkey tumor virus, molluscum contagiosum virus, Parvovirus B19, hepatitis B.

[0061] Multiple examples of genomic sequences for all these viruses are available from public databases such as the National Center for Biotechnology Information (http://www.ncbi.nlm.nih.gov/) or the virus genomics and bioinformatics resources centre at University College London (http://www.biochem.ucl.ac.uk/bsm/virus_database/VIDA.html).

[0062] According to a preferred aspect of the present invention a combinatorial approach was used to entirely redesign the DNA binding domain of the I-CreI protein and thereby engineer novel meganucleases with fully engineered specificity.

[0063] In particular therefore the I-CreI variant is characterized in that at least one of the two I-CreI monomers has at least two substitutions, one in each of the two functional subdomains of the LAGLIDADG core domain comprises mutations at two or more of positions 26, 28, 30, 32, 33, 38 and/or 40 and 44, 68, 70, 75 and/or 77 of I-CreI, said variant being able to cleave a DNA target sequence from the genome of a non-integrating virus (NIV), and being obtainable by a method comprising at least the steps of:

[0064] (a) constructing a first series of I-CreI variants having at least one substitution in a first functional subdomain of the LAGLIDADG core domain in at least one of positions 26, 28, 30, 32, 33, 38 of I-CreI,

[0065] (b) constructing a second series of I-CreI variants having at least one substitution in a second functional subdomain of the LAGLIDADG core domain in at least one of positions 44, 68, 70, 75 and/or 77 of I-CreI,

[0066] (c) selecting and/or screening the variants from the first series of step (a) which are able to cleave a mutant I-CreI site wherein at least one of (i) the nucleotide triplet in positions −10 to −8 of the I-CreI site has been replaced with the nucleotide triplet which is present in positions −10 to −8 of said DNA target sequence from the NIV genome and (ii) the nucleotide triplet in positions +8 to +10 has been replaced with the reverse complementary sequence of the nucleotide triplet which is present in positions −10 to −8 of said DNA target sequence from the NIV genome,

[0067] (d) selecting and/or screening the variants from the second series of step (b) which are able to cleave a mutant I-CreI site wherein at least one of (i) the nucleotide triplet in positions −5 to −3 of the I-CreI site has been replaced with the nucleotide triplet which is present in positions −5 to −3 of said DNA target sequence from the NIV genome and (ii) the nucleotide triplet in positions +3 to +5 has been replaced with the reverse complementary sequence of the nucleotide triplet which is present in position −5 to −3 of said DNA target sequence from the NIV genome,

[0068] (e) selecting and/or screening the variants from the first series of step (a) which are able to cleave a mutant I-CreI site wherein at least one of (i) the nucleotide triplet in positions +8 to +10 of the I-CreI site has been replaced with the nucleotide triplet which is present in positions +8 to +10 of said DNA target sequence from the NIV genome and (ii) the nucleotide triplet in positions −10 to −8 has been replaced with the reverse complementary sequence of the nucleotide triplet which is present in positions +8 to +10 of said DNA target sequence from the NIV genome,

[0069] (f) selecting and/or screening the variants from the second series of step (b) which are able to cleave a mutant I-CreI site wherein at least one of (i) the nucleotide triplet in positions +3 to +5 of the I-CreI site has been replaced with the nucleotide triplet which is present in positions +3 to +5 of said DNA target sequence from the NIV genome and (ii) the nucleotide triplet in positions −5 to −3 has been replaced with the reverse complementary sequence of the nucleotide triplet which is present in positions +3 to +5 of said DNA target sequence from the NIV genome,

[0070] (g) combining in a single variant, the mutation(s) in positions 26, 28, 30, 32, 33, 38 and/or 40 and 44, 68, 70, 75 and/or 77 of two variants from step (c) and step (d), to obtain a novel homodimeric I-CreI variant which cleaves a sequence wherein (i) the nucleotide triplet in positions −10 to −8 is identical to the nucleotide triplet which is present in positions −10 to −8 of said DNA target sequence from the NIV genome, (ii) the nucleotide triplet in positions +8 to +10 is identical to the reverse complementary sequence of the nucleotide triplet which is present in positions −to −8 of said DNA target sequence from the NIV genome, (iii) the nucleotide triplet in positions −5 to −3 is identical to the nucleotide triplet which is present in positions −5 to −3 of said DNA target sequence from the NIV genome and (iv) the nucleotide triplet in positions +3 to +5 is identical to the reverse complementary sequence of the nucleotide triplet which is present in positions −5 to −3 of said DNA target sequence from the NIV genome, and/or

[0071] (h) combining in a single variant, the mutation(s) in positions 26, 28, 30, 32, 33, 38 and 44, 68, 70, 75 and/or 77 of two variants from step (e) and step (f), to obtain a novel homodimeric I-CreI variant which cleaves a sequence wherein (i) the nucleotide triplet in positions +8 to +10 of the I-CreI site has been replaced with the nucleotide triplet which is present in positions +8 to +10 of said DNA target sequence from the NIV genome and (ii) the nucleotide triplet in positions −10 to −8 is identical to the reverse complementary sequence of the nucleotide triplet in positions +8 to +10 of said DNA target sequence from the NIV genome, (iii) the nucleotide triplet in positions +3 to +5 is identical to the nucleotide triplet which is present in positions +3 to +5 of said DNA target sequence from the NIV genome, (iv) the nucleotide triplet in positions −5 to −3 is identical to the reverse complementary sequence of the nucleotide triplet which is present in positions +3 to +5 of said DNA target sequence from the NIV genome,

[0072] (i) combining the variants obtained in steps (g) and (h) to form heterodimers, and

[0073] (j) selecting and/or screening the heterodimers from step (i) which are able to cleave said DNA target sequence from the NIV genome.

[0074] In particular the heterodimer of step (i) may comprise monomers obtained in steps (g) and (h), with the same DNA target recognition and cleavage activity properties.

[0075] Alternatively the heterodimer of step (i) may comprise monomers obtained in steps (g) and (h), with different DNA target recognition and cleavage activity properties.

[0076] In particular the first series of I-CreI variants of step (a) are derived from a first parent meganuclease.

[0077] In particular the second series of variants of step (b) are derived from a second parent meganuclease.

[0078] In particular the first and second parent meganucleases are identical.

[0079] Alternatively the first and second parent meganucleases are different.

[0080] In particular the variant may be obtained by a method comprising the additional steps of:

[0081] (k) selecting heterodimers from step (j) and constructing a third series of variants having at least one substitution in at least one of the monomers of said selected heterodimers,

[0082] (l) combining said third series variants of step (k) and screening the resulting heterodimers for enhanced cleavage activity against said DNA target from the NIV genome.

[0083] The inventors have found that although specific meganucleases can be generated to a particular target in the Non-integrating Virus genome using the above method, that such meganucleases can be improved further by additional rounds of substitution and selection against the intended target.

[0084] In particular in step (k) the substitutions in the third series of variants are introduced by site directed mutagenesis in a DNA molecule encoding said third series of variants, and/or by random mutagenesis in a DNA molecule encoding said third series of variants.

[0085] In the additional rounds of substitution and selection, the substitution of residues in the meganucleases can be performed randomly, that is wherein the chances of a substitution event occurring are of equal chance across all the residues of the meganuclease. Or on a site directed basis wherein the chances of certain residues being subject to a substitution is higher than other residues.

[0086] In particular steps (k) and (l) are repeated at least two times and wherein the heterodimers selected in step (k) of each further iteration are selected from heterodimers screened in step (l) of the previous iteration which showed increased cleavage activity against said DNA target from the NIV genome.

[0087] The inventors have found that the meganucleases can be further improved by using multiple iterations of the additional steps (k) and (l).

[0088] In particular the variant comprises one or more substitutions in positions 137 to 143 of I-CreI that modify the specificity of the variant towards the nucleotide in positions ±1 to 2, ±6 to 7 and/or ±11 to 12 of the target site in the NIV genome.

[0089] In particular the variant comprises one or more substitutions on the entire I-CreI sequence that improve the binding and/or the cleavage properties of the variant towards said DNA target sequence from the NIV genome.

[0090] As well as specific mutations at the residue identified above, the present invention also encompasses the substitution of any of the residues present in the I-CreI enzyme.

[0091] In particular wherein said substitutions are replacement of the initial amino acids with amino acids selected in the group consisting of A, D, E, F, G, H, I, K, M, N, P, Q, R, S, T, Y, C, W, L and V.

[0092] In particular the variant is a heterodimer, resulting from the association of a first and a second monomer having different mutations in positions 26, 28, 30, 32, 33, 38 and/or 40 and 44, 68, 70, 75 and/or 77 of I-CreI, said heterodimer being able to cleave a non-palindromic DNA target sequence from the NIV genome. In particular the variant may be characterized in that it recognizes and cleaves a target sequence which comprises a specific nucleotide or group(s) of nucleotide(s) at one or more of positions ±1 to 12 which differs from the C1221 target (SEQ ID NO: 2) at least by one nucleotide.

[0093] In particular in the positions ±3 to 5, ±8 to 10 or ±1 to 2.

[0094] In particular wherein the sequence of nucleotides at the specified position is selected from the following groups:

[0095] ±3 to 5-CAC, GCC, GTG, GGC, GGT, ACC, CTG, TAC, GTC, GTT, ATG, TGG;

[0096] ±8 to 10-AAA, AGG, TTT, CCT, AAG, ACT, CTT, AGT, TGC, GGG, GCT, TGG, ATT;

[0097] ±1 to 2-GTAC, GTAA, TTAC, ACAC, GAGA, GAAC, TTTT, ATAA.

[0098] As explained above the I-CreI enzyme acts as a dimer, by ensuring that the variant is a heterodimer this allows a specific combination of two different I-CreI monomers which increases the possible targets cleaved by the variant.

[0099] In particular the heterodimeric variant is an obligate heterodimer variant having at least one pair of mutations in corresponding residues of the first and the second monomers which mediate an intermolecular interaction between the two I-CreI monomers, wherein the first mutation of said pair(s) is in the first monomer and the second mutation of said pair(s) is in the second monomer and said pair(s) of mutations impairs the formation of functional homodimers from each monomer without preventing the formation of a functional heterodimer, able to cleave the genomic DNA target from the NIV genome.

[0100] The inventors have previously established a number of residue changes which can ensure an I-CreI monomer is an obligate heterodimer (WO2008/093249, CELLECTIS).

[0101] In particular the monomers have at least one of the following pairs of mutations, respectively for the first and the second monomer:

[0102] a) the substitution of the glutamic acid in position 8 with a basic amino acid, preferably an arginine (first monomer) and the substitution of the lysine in position 7 with an acidic amino acid, preferably a glutamic acid (second monomer); the first monomer may further comprise the substitution of at least one of the lysine residues in positions 7 and 96, by an arginine.

[0103] b) the substitution of the glutamic acid in position 61 with a basic amino acid, preferably an arginine (first monomer) and the substitution of the lysine in position 96 with an acidic amino acid, preferably a glutamic acid (second monomer); the first monomer may further comprise the substitution of at least one of the lysine residues in positions 7 and 96, by an arginine

[0104] c) the substitution of the leucine in position 97 with an aromatic amino acid, preferably a phenylalanine (first monomer) and the substitution of the phenylalanine in position 54 with a small amino acid, preferably a glycine (second monomer); the first monomer may further comprise the substitution of the phenylalanine in position 54 by a tryptophane and the second monomer may further comprise the substitution of the leucine in position 58 or lysine in position 57, by a methionine, and

[0105] d) the substitution of the aspartic acid in position 137 with a basic amino acid, preferably an arginine (first monomer) and the substitution of the arginine in position 51 with an acidic amino acid, preferably a glutamic acid (second monomer).

[0106] In particular the variant, which is an obligate heterodimer, wherein the first and the second monomer, respectively, further comprises the D137R mutation and the R51D mutation.

[0107] In particular the variant, which is an obligate heterodimer, wherein the first monomer further comprises the K7R, E8R, E61R, K96R and L97F or K7R, E8R, F54W, E61R, K96R and L97F mutations and the second monomer further comprises the K7E, F54G, L58M and K96E or K7E, F54G, K57M and K96E mutations.

[0108] Alternatively there is provided a single-chain chimeric meganuclease which comprises two monomers or core domains of one or two variant(s) according to the first aspect of the present invention, or a combination of both as previously described in WO03078619 and WO2009095742, from CELLECTIS relating to single-chain meganucleases.

[0109] The single chain meganuclease of the present invention further comprises obligate heterodimer mutations as described above so as to obtain single chain obligate heterodimer meganuclease variants.

[0110] An alternative approach to ensuring that the variant consists of a specific combination of monomers is to link the selected monomers for instance using a peptide linker.

[0111] In particular the single-chain meganuclease comprises a first and a second monomer according to the first aspect of the present invention, connected by a peptidic linker.

### (i) Herpesviridae Viruses

[0112] In particular the DNA target is within an essential gene or regulatory element or structural element of the Herpesviridae Virus genome.

[0113] Most particularly the Herpesviridae Virus is a virus which causes a disease in higher animals and in particular mammals.

[0114] In particular the Herpesviridae Virus is a virus selected from the group comprising: herpes simplex virus type 1, herpes simplex virus type 2, varicella-zoster virus, cytomegalovirus, Epstein-Barr virus, human herpes virus 6 (variants A and B), human herpes virus 7, Kaposi's sarcoma virus and human herpes virus 8.

[0115] Multiple examples of genomic sequences for all these viruses are available from public databases such as the National Center for Biotechnology Information (http://www.ncbi.nlm.nih.gov/) or the virus genomics and bioinformatics resources centre at University College London (http://www.biochem.ucl.ac.uk/bsm/virus_database/VIDA.html).

[0116] These publicly available resources together with the detailed materials and methods described in the present patent application mean that meganuclease variants cleaving appropriate targets in their genomes can be generated and that in turn these variants can be used to cleave the viral genomic material in vivo for therapeutic and/or research purposes in accordance with the various aspects of the present invention.

[0117] In particular the herpes simplex virus is Herpes Simplex Virus (HSV) Type 1 or Type 2.

[0118] In particular the DNA target sequence is from a Herpes Simplex Virus Type 1 or Type 2.

[0119] In particular the variants may be selected from the group consisting of SEQ ID NO: 25 to 36, 40 to 90, 93 to 151, 153 to 168, 171 to 246, 249 to 252, 267 to 273, 275 to 288, 290 to 433, 436 to 445, 455 to 463, 470 to 471, 511 to 521, 522 to 531, 541 to 554 and 592 to 605.

[0120] In particular the single chain variants may be selected from the group consisting of SEQ ID NO: 253 to 261, 446 to 454, 465-466, 532 to 534, 535, 556 to 568, 571 to 580, 583 to 590 and 607 to 612.

[0121] In particular said DNA target is selected from the group consisting of the sequences SEQ ID NO: 8 to 13, 17 to 24, 472, 477 to 482, 487 to 492, 497 to 502, 507 to 510.

[0122] In particular said DNA target is within a DNA sequence essential for HSV replication, viability, packaging or virulence.

[0123] In particular the DNA target is within an open reading frame of the HSV genome, selected from the group: RL2, RS1, US2, UL19, UL30 or UL5.

[0124] In the present patent application the inventors provide meganuclease variants which can cleave targets in the RL2/ICP0 gene (targets HSV 12 and 4, SEQ ID NO: 20 and 17 respectively); in the RS1 gene (targets HSV 13 and 14, SEQ ID NO: 21 and 22 respectively); in the US2 gene (target HSV 1, SEQ ID NO: 23), in the UL19 gene (target HSV 2, SEQ ID NO: 24), in the UL30 gene (target HSV8) and in the UL5 gene (target HSV9). The cleavage of these sites in the HSV genome in vivo would therefore disrupt the sequence encoding the corresponding gene and thereby following a disruption and/or alteration of these gene sequences inactivate the HSV genome.

[0125] The RL2 gene encodes an important immediate early transcription factor acting as a regulatory protein (a0). This gene is considered as non essential due to its possible replacement by cellular transcription factors. However, it has been considered of major interest due to its localization in TRL, which is essential for HSV-1. Moreover, the central role of a0 during acute infection, latency establishment and virus reactivation has lead us to consider ICP0 as an integrator of essential signals. ICP0 gene is located in the 9 kb RL region repeated twice in HSV genome. This RL region encodes most of the gene for the latency associated transcript. This region is the unique active region during latency phase. Thus, targeting ICP0 gene would allow targeting an “opened” genomic sequence of quiescent virus and an important immediate early protein during virus infection and vegetative production. Many meganucleases can be built to recognize sequences in ICP0 gene. HSV4 described latter is one of them.

[0126] HSV12 is an example of a target from within the RL2 gene for which meganuclease variants can be generated. The HSV12 target sequence (cctggacatggagacggggaacat, SEQ ID NO: 501) is located at positions 5168-5191 bp and 121180-121203 bp in exon 3 of the RL2 gene repeated from positions 2086 to 5698 and from positions 120673 to 124285. Shown in Table II are two heterodimeric I-CreI variants which recognize and cleave the HSV12 target. Throughout the present patent application the sequence of the I-CreI variants described herein may be made using the following notation 24V33C etc. In this notation the numeral refers to the amino acid number in the I-CreI monomer and the letter refers to the amino acid present in this variant. If a residue is not explicitly listed this means this residue is identical to the residue in the wild type or parent I-CreI monomer as appropriate.

TABLE II
Example of heterodimeric meganuclease variants
cleaving the HSV12

(cctggacatggagacggggaacat) target
HSV12.3-M1 (SEQ ID NO: 25)
24V33C38S44I50R70S75N77R132V
+
HSV12.4-ME-132V (SEQ ID NO: 26)
19S8K30R33S44K66H68Y70S77T87I132V139R163S
HSV12.3-M1-80K (SEQ ID NO: 27)
24V33C38S44I50R70S75N77R80K132V
+
HSV12.4-ME-132V (SEQ ID NO: 26)
19S8K30R33S44K66H68Y70S77T87I132V139R163S

[0127] ICP4 (RS1) gene is located in the RS region (6.6 kb) repeated twice in HSV-1 genome. IRS and TRS are located from positions 125974 to 132604 and from 145585 to 152259. The ICP4 virus essential gene, functions at the earliest stages of the productive infection cycle. RS1 encodes the immediate early transcription activator (a4) which, upon infection, directs cellular machinery to viral gene expression. This protein functions in association with ICP0 (a0) and ICP27 (a27) to improve viral gene expression and viral mRNA translation. Thus targeting ICP4 gene is of major interest in a meganuclease mediated antiviral approach.

[0128] The ICP4 gene can be targeted by many meganucleases. For example, sequences aggggacggggaacagcgggtggt (SEQ ID NO: 21) and ctcttatcgtcttcgggggtcgc (SEQ ID NO: 22) are recognized and efficiently cleaved by I-CreI variants HSV13 and HSV14. HSV13 target sequence is located from positions 128569 to 128592 and from 149641 to 149664 (NC_{—}001806). An example of I-CreI variant targeting HSV13 is shown in Table III.

TABLE III
Example of heterodimeric meganuclease variants
cleaving the HSV13

(atgttccccgtctccatgtccagg) target
HSV13-3-M15-19S (SEQ ID NO: 28)
6S 19S 28E 33R 38R 40K 43L 44N 68H 70S 75Y 77N 79G
80K
+
HSV13-4-MD (SEQ ID NO: 29)
30R 44R 60E 68Y 70S 75N 77D 80G
HSV13-3-M16-19S (SEQ ID NO: 30)
6S 19S 28E 33R 38R 40K 44N 68H 70S 75Y 77N 79G 80K
105A
+
HSV13-4-MD (SEQ ID NO: 29)
30R 44R 60E 68Y 70S 75N 77D 80G

[0129] HSV14 target sequence is located from positions 128569 to 128592 and from 149641 to 149664 (NC_{—}001806). An example of I-CreI variant targeting HSV14 is shown in Table IV.

TABLE IV
Example of heterodimeric meganuclease variants
cleaving the HSV14

(ctcttcttcgtcttcgggggtcgc) sequence
HSV14.3-MA-19S (SEQ ID NO: 31)
19S33G38C44K66H68Y70S77T
+
HSV14.4-MB (SEQ ID NO: 32)
33H40R43L44K54I68A70S115V129A

[0130] The US2 gene is located in the US region of the HSV-1 genome. The 12 open reading frames contained in this 13 kb region are implicated in virus defense against host response, most of gene products are glycoproteins. The US2 gene is located from positions 134053 to 134928, less than 2 kb downstream the IRS region coding a4. This gene encodes a possible envelope-associated protein which interacts with cytokeratin 18. By targeting this gene the inventors of the present invention wanted to evaluate the accessibility of this locus as well as have an evaluation of the cleavage effect of this non essential viral gene toward HSV infection.

[0131] Among the multiple sequences recognized by I-CreI variants, the HSV1 target sequence atgggacgtcgtaagggggcctgg, (SEQ ID NO: 23) (134215-134238) is targeted by meganuclease as detailed in Table V below.

TABLE V
Example of heterodimeric meganuclease variants
cleaving the HSV1

(atgggacgtcgtaagggggcctgg) target
HSV1.3-M5 (SEQ ID NO: 470)
30R33G38T106P
+
HSV1.4-MF (SEQ ID NO: 471)
30G38R44K57E70E75N108V

[0132] HSV2 is a 24 bp (non-palindromic) target present in the UL19 gene encoding the HSV-1 major capsid protein. This 5.7 kb gene in present in one copy in the locus 35023 to 40768 of the UL region. The HSV1-major capsid protein is expressed without maturation from an ORF located from 36404 to 40528. The target HSV2 is located from nucleotide 36966 to 36989 (accession number NC_{—}001806. The HSV2 target is recognized and cleaved by the meganuclease shown in Table VI below.

TABLE VI
Example of heterodimeric meganuclease variants
cleaving the HSV2

(ataaactcacacacggcgtcctgg) target
HSV2.3-M1 (SEQ ID NO: 33)
44D68T70S75R77R80K
+
HSV2.4-MC (SEQ ID NO: 34)
28E38R40K44K54I70S75N

[0133] HSV4 is a 24 bp (non-palindromic) target present in the RL2 gene encoding the ICP0 or a0 protein. This 3.6 kb gene repeated twice in TRL (2086 to 5698) and IRL (120673 to 124285) regions is formed of three exons: position 2261 to 2317, 3083 to 3749, 3886 to 5489 and 120882 to 122485,122622 to 123288, 124054 to 124110. The target sequence present in exon 2 corresponds to positions 3498 to 3521 and 122850 to 122873 in the two copies of the HSV-1 ICP₀ gene (accession number NC_{—}001806). The HSV4 target is recognized and cleaved by the meganuclease shown in Table VII below.

TABLE VII
Example of heterodimeric meganuclease variants
cleaving the HSV4

(ccaagctggtgtacctgatagtgg) target
HSV4.3 optimised variant (SEQ ID NO: 35)
44M70A80K132V146K156G
+
HSV4.4 optimised variant (SEQ ID NO: 36)
32E38Y44A68Y70S75Y77K105A

[0134] HSV8 is a 24 bp (non-palindromic) target (HSV8: CC-GCT-CT-GTT-TTAC-CGC-GT-CTA-CG, SEQ ID NO:481, FIG. 50) present in the UL30 gene encoding the DNA polymerase catalytic subunit of HSV-1. The herpes simplex virus DNA polymerase (HSV pol) holoenzyme consists of a large catalytic (UL30) and a small auxiliary subunit (UL42) (Franz C et al., Virology. 1999 Jan. 5; 253(1):55-64).

[0135] This 4 kb gene is present in one copy at position 62606 to 66553 of the UL region. The UL30 gene is required during viral genome multiplication. For optimal DNA synthesis HSV-1 needs replication proteins, ICP8, DNA polymerase (UL30/UL42), and helicase-primase (UL5/UL52/UL8) (Nimonkar A V & Boehmer P E., J Biol. Chem. 2004 May 21; 279(21):21957-65). This gene is expressed at the early stage of acute infection and is considered as essential for virus replication in cell culture. The target HSV8 is located from nucleotide 63600 to 63623 (accession number NC_{—}001806; FIG. 1).

[0136] HSV9 is a 24 bp (non-palindromic) target (HSV9: GC-AAG-AC-CAC-GTAA-GGC-AG-GGG-GG (SEQ ID NO: 491), FIG. 51) present in the UL5 gene encoding a subunit of helicase-primase of HSV-1.

[0137] This 3.4 kb gene is present in one copy at position 11753 to 15131 of the UL region. The UL5 gene is one of the genes required during viral genome multiplication (Nimonkar A V & Boehmer P E., J Biol. Chem. 2004 May 21; 279(21):21957-65). This gene is expressed at the early stage of acute infection and is considered as essential for virus replication in cell culture (Zhu L, Weller S K. Virology. 1988 October; 166(2):366-78.). The target HSV9 is located from nucleotide 12833 to 12856 (accession number NC_{—}001806; FIG. 1).

### (ii) Hepadnaviridae Viruses

[0138] Alternatively the DNA target is within an essential gene or regulatory element or structural element of the Hepadnaviridae Virus genome.

[0139] In particular the Hepadnaviridae Virus is a virus which causes a disease in higher animals and in particular mammals.

[0140] Most particularly the DNA target is from the genome of hepatitis B.

[0141] In particular the DNA target is from a hepatitis B virus of genotype A.

[0142] As indicated above HBV exhibits genetic variability with an estimated rate of 1.4-3.2×10⁻⁵ nucleotide substitutions per site per year. A large number of virus variants arise during replication as a result of nucleotide misincorporations in the absence of any proof reading capacity by the viral polymerase. This variability has resulted in well recognized subtypes of the virus. HBV has been classified into 8 well defined genotypes on the basis of an inter-group divergence of 8% or more in the complete genomic sequence, each having a distinct geographical distribution. Genotype A is most commonly found in Northern Europe, North America and Central Africa, while genotype B predominates in Asia (China, Indonesia and Vietnam). Genotype C is found in the Far East in Korea, China, Japan and Vietnam as well as the Pacific and Island Countries, while genotype D is found in the Mediterranean countries, the Middle East extending to India, North America and parts of the Asia-Pacific region. Genotype E is related to Africa while genotype F is found predominately in South America, including among Amerindian populations, and also Polynesia. Genotype G has been found in North America and Europe while the most recently identified genotype H has been reported from America (Schaefer, World J. Gastroenterol., 2007, 13:14-21).

[0143] In the present patent application the inventors have also generated meganuclease variants to targets present in the genome of hepatitis B virus either in genotype A subtype adw2 (Preisler-Adams et al., Nucleic Acids Research, 1993, Vol. 21, No. 9), which corresponds to Genbank accession number X70185 or in subtype adr, which corresponds to Genbank accession number M38636.

[0144] In particular said DNA target is within a DNA sequence essential for HBV replication, viability, packaging or virulence.

[0145] In particular the DNA target is within an open reading frame of the HBV genome, selected from the group: C ORF, S ORF, P ORF and X ORF.

[0146] The HBV virion genome contains four overlapping open reading frames (ORFS) in the genome which are responsible for the transcription and expression of seven different hepatitis B proteins. The transcription and translation of these proteins is through the use of multiple in-frame start codons. The HBV genome also contains parts that regulate transcription, determine the site of polyadenylation and a specific transcript for encapsidation into the capsid.

[0147] Details concerning the four overlapping open reading frames of the HBV genome are detailed in the introduction above. In particular the DNA target is located in one of the HBV genomic genes selected from the group: viral core protein, e-antigen, small (S) hepatitis B surface antigen, medium (M) hepatitis B surface antigen, large (L) hepatitis B surface antigen, viral DNA polymerase, X protein.

[0148] In the present patent application the inventors provide meganuclease variants which can cleave targets in the S ORF and P ORF (target HBV12, SEQ ID NO: 616) and two independent targets in the C ORF (target HBV 8, SEQ ID NO: 685 and target HBV3, SEQ ID NO: 723). The cleavage of these sites in the HBV genome in vivo would therefore disrupt the sequence encoding the small (S) hepatitis B surface antigen, medium (M) hepatitis B surface antigen, large (L) hepatitis B surface antigen, viral DNA polymerase, viral core protein and e-antigen of the virus and thereby following a disruption and/or alteration of these gene sequences inactivate the HBV genome.

[0149] In particular the variants may be selected from the group consisting of SEQ ID NO: 621 to 626; 628 to 633; 635 to 647; 665 to 678; 690 to 697; 699 to 702; 705 to 715; 730 to 734; 736 to 740; 743 to 750; 752 to 759; 761 to 765; 767 to 771; 780 to 798.

[0150] In particular the single chain variants may be selected from the group consisting of SEQ ID NO: 788, 799 to 800, 804 to 805.

[0151] In particular said DNA target is selected from the group consisting of the sequences SEQ ID NO: 616 to 619; 685 to 688; 723 to 728.

[0152] According to a second aspect of the present invention there is provided a polynucleotide fragment encoding a variant according to the first aspect of the present invention. The polynucleotide fragment can be either cDNA or mRNA encoding a variant according the first aspect of the present invention.

[0153] According to a third aspect of the present invention there is provided an expression vector comprising at least one polynucleotide fragment according to the second aspect of the present invention.

[0154] In particular the expression vector, includes a targeting construct comprising a sequence to be introduced flanked by sequences sharing homologies with the regions surrounding said DNA target sequence from the non-integrating Virus genome.

[0155] One important use of a variant according to the present invention is in increasing the incidence of homologous recombination events at or around the site where the variant cleaves its target. The present invention therefore also relates to a unified genetic construct which encodes the variant under the control of suitable regulatory sequences as well as sequences homologous to portions of the Non-integrating Virus genome surrounding the variant DNA target site. Following cleavage of the target site by the variant these homologous portions can act as a complementary sequences in a homologous recombination reactions with the Non-integrating Virus genome replacing the existing Non-integrating Virus genome sequence with a new sequence engineered between the two homologous portions in the unified genetic construct.

[0156] Preferably, homologous sequences of at least 50 bp, preferably more than 100 bp and more preferably more than 200 bp are used. Shared DNA homologies are located in regions flanking upstream and downstream the site of the break and the DNA sequence to be introduced should be located between the two arms.

[0157] Therefore, the targeting construct is preferably from 200 bp to 6000 bp, more preferably from 1000 bp to 2000 bp; it comprises: a sequence which has at least 200 bp of homologous sequence flanking the target site, for repairing the cleavage and a sequence for inactivating the Non-integrating Virus genome and/or a sequence of an exogeneous gene of interest.

[0158] For the insertion of a sequence, DNA homologies are generally located in regions directly upstream and downstream to the site of the break (sequences immediately adjacent to the break; minimal repair matrix). However, when the insertion is associated with a deletion of ORF sequences flanking the cleavage site, shared DNA homologies are located in regions upstream and downstream the region of the deletion.

[0159] A vector which can be used in the present invention includes, but is not limited to, a viral vector, a plasmid, a RNA vector or a linear or circular DNA or RNA molecule which may consist of a chromosomal, non chromosomal, semi-synthetic or synthetic nucleic acids. Preferred vectors are those capable of autonomous replication (episomal vector) and/or expression of nucleic acids to which they are linked (expression vectors). Large numbers of suitable vectors are known to those of skill in the art and commercially available.

[0160] Viral vectors include retrovirus, adenovirus, parvovirus (e.g. adenoassociated viruses), coronavirus, negative strand RNA viruses such as orthomyxovirus (e.g., influenza virus), rhabdovirus (e.g., rabies and vesicular stomatitis virus), paramyxovirus (e.g. measles and Sendai), positive strand RNA viruses such as picornavirus and alphavirus, and double-stranded DNA viruses including adenovirus, herpesvirus (e.g., Herpes Simplex virus types 1 and 2, Epstein-Barr virus, cytomegalovirus), and poxvirus (e.g., vaccinia, fowlpox and canarypox). Other viruses include Norwalk virus, togavirus, flavivirus, reoviruses, papovavirus, hepadnavirus, and hepatitis virus, for example. Examples of retroviruses include: avian leukosissarcoma, mammalian C-type, B-type viruses, D type viruses, HTLV-BLV group, lentivirus, spumavirus (Coffin, J. M., Retroviridae: The viruses and their replication, In Fundamental Virology, Third Edition, B. N. Fields, et al., Eds., Lippincott-Raven Publishers, Philadelphia, 1996).

[0161] Vectors can comprise selectable markers, for example: neomycin phosphotransferase, histidinol dehydrogenase, dihydrofolate reductase, hygromycin phosphotransferase, herpes simplex virus thymidine kinase, adenosine deaminase, glutamine synthetase, and hypoxanthine-guanine phosphoribosyl transferase (HRPT) for eukaryotic cell culture; TRP1 for S. cerevisiae; tetracycline, rifampicin or ampicillin resistance in E. coli.

[0162] In particular for the purposes of gene therapy and in accordance with a preferred embodiment of the present invention, the viral vector is selected from the group comprising lentiviruses, Adeno-associated viruses (AAV) and Adenoviruses.

[0163] A particular advantage of using virus vectors to deliver a variant which cleaves a virus target for a therapeutic purpose, is that the administration of the virus vector per se will illicit an immune response from the treated organism which in turn will impede the virus infection.

[0164] In accordance with another aspect of the present invention the variant and targeting construct may be on different nucleic acid constructs.

[0165] In accordance with another aspect of the present invention the variant in a peptide form and the targeting construct as a nucleic acid molecule may be used in combination.

[0166] In particular, wherein the sequence to be introduced is a sequence which inactivates the Non-integrating Virus genome.

[0167] In particular, wherein the sequence which inactivates the Non-integrating Virus genome comprises in the 5′ to 3′ orientation: a first transcription termination sequence and a marker cassette including a promoter, the marker open reading frame and a second transcription termination sequence, and said sequence interrupts the transcription of the coding sequence.

[0168] In particular, wherein said sequence sharing homologies with the regions surrounding DNA target sequence is from the Non-integrating Virus genome is a fragment of the Non-integrating Virus genome comprising sequences upstream and downstream of the cleavage site, so as to allow the deletion of coding sequences flanking the cleavage site.

[0169] According to a fourth aspect of the present invention there is provided a host cell which is modified by a polynucleotide according to a second aspect of the present invention or a vector according to a third aspect of the present invention.

[0170] A cell according to the present invention may be made according to a method, comprising at least the step of:
[0171] (a) introducing into a cell, a meganuclease, as defined above, so as to induce a double stranded cleavage at a site of interest of the Non-integrating Virus genome comprising a DNA recognition and cleavage site of said meganuclease, and thereby generate a cell comprising at least one modified Non-integrating Virus genome, in particular having repaired the double-strands break, by non-homologous end joining, and
[0172] (b) isolating the cell of step(a), by any appropriate mean.

[0173] The cell which is modified may be any cell of interest. For making transgenic/knock-out animals, the cells are pluripotent precursor cells such as embryo-derived stem (ES) cells, which are well-known in the art. For making recombinant cell lines, the cells may advantageously be human cells, for example HSV infecting cell lines such as human hepatoblastoma cell lines, hepatocellular carcinoma (Fellig et al., (2004) Biochemical and Biophysical Research Communications, Volume 321, Issue 2, Pages 269-274) or a more general cell line such as CHO or HEK293 (ATCC # CRL-1573) cells. The meganuclease can be provided directly to the cell or through an expression vector comprising the polynucleotide sequence encoding said meganuclease linked to regulatory sequences suitable for directing its expression in the cell used.

[0174] In addition to generating cells comprising modified Non-integrating

[0175] Virus genomes, the present invention also relates to modifying a copy(ies) of the Non-integrating Virus genome which have been genomically integrated into the host cell genome. Such modified cell lines are useful for elucidating aspects of virus biology amongst many other potential uses.

[0176] Such a modified cell line would have a number of potential uses including the elucidation of aspects of the biology of the modified NIV genome as well as a model for screening compounds and other substances for therapeutic effects against cells comprising the modified NIV genome.

[0177] The present invention therefore also relates to meganuclease variants which can recognise and cleave targets comprised in genomic insertions of viruses which do not normally insert into the host cell genome. The non-specific insertion of viral genetic material into the host cell genome as a disease causing mechanism is currently being investigated. For example in hepatitis B, chronic infection with this virus is associated with a greatly elevated risk of hepatocellular carcinoma. In the past this association has been explained as a side effect of the episomal hepatitis B genome upon the hepatocyte host cells. Although this is doubtless true, recently the random genomic insertion of copies of the hepatitis B genome into the host cell genome has also been shown to be a causative factor in hepatocyte carcinoma (Goodarzi et al., 2008, Hep. Mon; 8 (2): 129-133).

[0178] Hepatocellular carcinoma is one of the most common cancers in the world and hence a treatment for this condition, using a meganuclease variant which can cleave the randomly integrated hepatitis B genome and have a therapeutic affect upon hepatocytes via one or more of mechanisms detailed herein is therefore also within the scope of the present invention as are other meganuclease variants to genomically integrated copies of virus genetic material which cause a disease phenotype.

[0179] Such a modified cell line would have a number of potential uses including the elucidation of aspects of the biology of the modified Non-integrating Virus genome as well as a model for screening compounds and other substances for therapeutic effects against cells comprising the modified Non-integrating Virus genome.

[0180] The present invention therefore also relates to meganuclease variants which can recognise and cleave targets comprised in genomic insertions of viruses which do not normally insert into the host cell genome. The non-specific insertion of viral genetic material into the host cell genome as a disease causing mechanism is currently being investigated.

[0181] According to a fifth aspect of the present invention there is provided a non-human transgenic animal or plant which is modified by a polynucleotide according to a second aspect of the present invention or a vector according to a third aspect of the present invention. In particular these non-human transgenic animals or transgenic plants comprise a copy of the Non-integrating Virus genome integrated into the genome of the host organism.

[0182] The subject-matter of the present invention is also a method for making a transgenic animal comprising an integrated Non-integrating Virus genome, comprising at least the step of:

[0183] (a) introducing into a pluripotent precursor cell or an embryo of an animal, a meganuclease, as defined above, so as to induce a double stranded cleavage at a site of interest of the integrated Non-integrating Virus genome comprising a DNA recognition and cleavage site of said meganuclease, and thereby generate a genomically modified precursor cell or embryo having repaired the double-strands break by non-homologous end joining,

[0184] (b) developing the genomically modified animal precursor cell or embryo of step (a) into a chimeric animal, and

[0185] (c) deriving a transgenic animal from a chimeric animal of step (b).

[0186] Alternatively, the Non-integrating Virus genome may be inactivated by insertion of a sequence of interest by homologous recombination between the genome of the animal and a targeting DNA construct according to the present invention.

[0187] Such transgenic animals/plants therefore can be used as model organisms to study the effects of genomically integrated virus genetic material which has been either introduced using a meganuclease based homologous recombination system or alternatively has been altered using a specific meganuclease variant.

[0188] In particular the targeting DNA is introduced into the cell under conditions appropriate for introduction of the targeting DNA into the site of interest.

[0189] In particular, step (b) comprises the introduction of the genomically modified precursor cell obtained in step (a), into blastocysts, so as to generate chimeric animals.

[0190] Such a transgenic animal could be used as a multicellular animal model to elucidate aspects of HSV biology by means of engineering the provirus present in the progenitor cell line. Such transgenic animals also could be used to screen and characterise the effects of novel anti-HSV medicaments.

[0191] In particular the targeting DNA construct is inserted in a vector.

[0192] For making transgenic animals/recombinant cell lines, including human cell lines expressing an heterologous protein of interest, the targeting DNA comprises the sequence of the exogenous gene encoding the protein of interest, and eventually a marker gene, flanked by sequences upstream and downstream of and essential gene in the Non-integrating Virus genome, as defined above, so as to generate genomically modified cells (animal precursor cell or embryo/animal or human cell) having replaced the HSV gene by the exogenous gene of interest, by homologous recombination.

[0193] The exogenous gene and the marker gene are inserted in an appropriate expression cassette, as defined above, in order to allow expression of the heterologous protein/marker in the transgenic animal/recombinant cell line.

[0194] The meganuclease can be used either as a polypeptide or as a polynucleotide construct encoding said polypeptide. It is introduced into somatic cells of an individual, by any convenient means well-known to those in the art, which are appropriate for the particular cell type, alone or in association with either at least an appropriate vehicle or carrier and/or with the targeting DNA.

[0195] According to the present invention, the meganuclease (polypeptide) can be associated with:
[0196] liposomes, polyethyleneimine (PEI); in such a case said association is administered and therefore introduced into somatic target cells.
[0197] membrane translocating peptides (Bonetta, The Scientist, 2002, 16, 38; Ford et al., Gene Ther., 2001, 8, 1-4; Wadia and Dowdy, Curr. Opin. Biotechnol., 2002, 13, 52-56); in such a case, the sequence of the variant/single-chain meganuclease is fused with the sequence of a membrane translocating peptide (fusion protein).

[0198] Alternatively, the meganuclease (polynucleotide encoding said meganuclease) and/or the targeting DNA is inserted in a vector. Vectors comprising targeting DNA and/or nucleic acid encoding a meganuclease can be introduced into a cell by a variety of methods (e.g., injection, direct uptake, projectile bombardment, liposomes, electroporation). Meganucleases can be stably or transiently expressed into cells using expression vectors. Techniques of expression in eukaryotic cells are well known to those in the art. (See Current Protocols in Human Genetics: Chapter 12 “Vectors For Gene Therapy” & Chapter 13 “Delivery Systems for Gene Therapy”). Optionally, it may be preferable to incorporate a nuclear localization signal into the recombinant protein to be sure that it is expressed within the nucleus.

[0199] Once in a cell, the meganuclease and if present, the vector comprising targeting DNA and/or nucleic acid encoding a meganuclease are imported or translocated by the cell from the cytoplasm to the site of action in the nucleus or the cytoplasm.

[0200] According to this aspect of the present invention there is provided a kit for carrying out the treatment of a NIV infection using an I-CreI variant according to the first aspect of the present invention, or a nucleotide molecule according to the second or third aspects of the present invention, characterized by a container with a solution comprising the following reactants:

[0201] an I-CreI variant which can recognise and cleave a DNA target sequence in the genome of the NIV; or

[0202] a nucleotide molecule which encodes an I-CreI variant which can recognise and cleave a DNA target sequence in the genome of the NIV;

[0203] any necessary preservative.

[0204] Such a kit may in particular also comprise further materials such as those necessary to allow intracellular, intranuclear entry of the active ingredient or increase its efficacy such as other anti-viral medicaments.

[0205] According to a further aspect of the present invention there is provided the use of at least one variant or at least one single-chain chimeric meganuclease according to the first aspect of the present invention, or at least one vector according to the third aspect of the present invention, for Non-integrating Virus genome engineering, for non-therapeutic or purposes.

[0206] In particular the variant or single-chain chimeric meganuclease, or vector is associated with a targeting DNA construct.

[0207] In particular the use of the variant is for inducing a double-strand break in a site of interest of the Non-integrating Virus genome comprising a Non-integrating Virus genomic DNA target sequence, thereby inducing a DNA recombination event, a DNA loss or DNA degradation.

[0208] According to the invention, said double-strand break is for: modifying a specific sequence in the Non-integrating Virus genome, so as to induce cessation of a Non-integrating Virus genome function such as replication, attenuating or activating the Non-integrating Virus genome or a gene therein, introducing a mutation into a site of interest of a Non-integrating Virus gene, introducing an exogenous gene or a part thereof, inactivating or deleting the Non-integrating Virus genome or a part thereof or leaving the DNA unrepaired and degraded.

[0209] According to this aspect of the present invention the use of the meganuclease according to the present invention, comprises at least the following steps: 1) introducing a double-strand break at a site of interest of the Non-integrating Virus genome comprising at least one recognition and cleavage site of said meganuclease, by contacting said cleavage site with said meganuclease; 2) providing a targeting DNA construct comprising the sequence to be introduced flanked by sequences sharing homologies to the targeted locus. Said meganuclease can be provided directly to the cell or through an expression vector comprising the polynucleotide sequence encoding said meganuclease and suitable for its expression in the used cell. This strategy is used to introduce a DNA sequence at the target site, for example to generate knock-in or knock-out animal models or cell lines that can be used for drug testing.

[0210] According to a further aspect of the present invention the use of the meganuclease, comprises at least the following steps: 1) introducing a double-strand break at a site of interest of the Non-integrating Virus genome comprising at least one recognition and cleavage site of said meganuclease, by contacting said cleavage site with said meganuclease; 2) maintaining said broken genomic locus under conditions appropriate for homologous recombination with chromosomal DNA sharing homologies to regions surrounding the cleavage site.

[0211] According to still further aspect of the present invention the use of the meganuclease, comprises at least the following steps: 1) introducing a double-strand break at a site of interest of the Non-integrating Virus genome comprising at least one recognition and cleavage site of said meganuclease, by contacting said cleavage site with said meganuclease; 2) maintaining said broken genomic locus under conditions appropriate for repair of the double-strands break by non-homologous end joining.

[0212] According to a further aspect of the present invention the variant is used for genome therapy or the making of knock-out Non-integrating Virus genomes, the sequence to be introduced is a sequence which inactivates the Non-integrating Virus genome. All Non-integrating Virus genomes present in the cell have to be targeted in order to totally inactivate the pathogenicity of the virus. In addition, the sequence may also delete the Non-integrating Virus genome or part thereof, and introduce an exogenous gene or part thereof (knock-in/gene replacement). For making knock-in Non-integrating Virus genomes the DNA which repairs the site of interest may comprise the sequence of an exogenous gene of interest, and a selection marker, such as the G418 resistance gene. Alternatively, the sequence to be introduced can be any other sequence used to alter the DNA in some specific way including a sequence used to modify a specific sequence, to attenuate or activate the endogenous gene of interest in the Non-integrating Virus genome or to introduce a mutation into a site of interest in the Non-integrating Virus genome.

[0213] Inactivation of the Non-integrating Virus genome may occur by insertion of a transcription termination signal that will interrupt the transcription of an essential gene such as a viral DNA polymerase and result in a truncated protein. In this case, the sequence to be introduced comprises, in the 5′ to 3′ orientation: at least a transcription termination sequence (polyA1), preferably said sequence further comprises a marker cassette including a promoter and the marker open reading frame (ORF) and a second transcription termination sequence for the marker gene ORF (polyA2). This strategy can be used with any variant cleaving a target downstream of the relevant gene promoter and upstream of the stop codon.

[0214] Inactivation of the Non-integrating Virus genome may also occur by insertion of a marker gene within an essential gene of Non-integrating Virus, which would disrupt the coding sequence. The insertion can in addition be associated with deletions of ORF sequences flanking the cleavage site and eventually, the insertion of an exogenous gene of interest (gene replacement).

[0215] In addition, inactivation of Non-integrating Virus may also occur by insertion of a sequence that would destabilize the mRNA transcript of an essential gene.

[0216] The present invention also provides a composition characterized in that it comprises at least one variant as defined above (variant or single-chain derived chimeric meganuclease) and/or at least one expression vector encoding the variant, as defined above.

[0217] In particular the composition comprises a targeting DNA construct comprising a sequence which inactivates the Non-integrating Virus genome, flanked by sequences sharing homologies with the Non-integrating Virus genomic DNA cleavage site of said variant, as defined above.

[0218] Preferably, said targeting DNA construct is either included in a recombinant vector or it is included in an expression vector comprising the polynucleotide(s) encoding the variant according to the invention.

[0219] The subject-matter of the present invention is also the use of at least one meganuclease and/or one expression vector, as defined above, for the preparation of a medicament for preventing, improving or curing a Non-integrating Virus and in particular a HSV infection in an individual in need thereof.

[0220] The subject-matter of the present invention is also the use of at least one variant and/or one expression vector, as defined above, for the preparation of a medicament for preventing, improving or curing a pathological condition associated with a Non-integrating Virus infection in an individual in need thereof.

[0221] In particular compositions according to the present invention may comprise more than one variant. The genome of a virus is subject to more changes than the genome of a higher organism such as a prokaryotic or eukaryotic cell. Therefore in a population of viruses in an infected individual it is possible that the DNA target recognized by the variant will be altered and hence the variant will not cut this target. To lessen the potential effects of such mutants, compositions according to the present invention may comprise variants which recognize and cleave different targets in the Non-integrating Virus genome. The chances of a particular virus having mutations in all the various targets cleaved by the variants contained in the composition are very low and hence the virus will be recognized and acted upon by at least one of the variants present in the composition.

[0222] The use of the meganuclease may comprise at least the step of (a) inducing in at least one Non-integrating Virus genome contained in an at least one cell of infected individual a double stranded cleavage at a site of interest of the Non-integrating Virus genome comprising at least one recognition and cleavage site of said meganuclease by contacting said cleavage site with said meganuclease, and (b) introducing into said at least one cell a targeting DNA, wherein said targeting DNA comprises (1) DNA sharing homologies to the region surrounding the cleavage site and (2) DNA which inactivates the Non-integrating Virus genome upon recombination between the targeting DNA and the Non-integrating Virus genome, as defined above. The targeting DNA is introduced into the Non-integrating Virus genome under conditions appropriate for introduction of the targeting DNA into the site of interest. The targeting construct may comprise sequences for deleting the Non-integrating Virus genome or a portion thereof and introducing the sequence of an exogenous gene of interest (gene replacement).

[0223] Alternatively, the Non-integrating Virus genome may be inactivated by the mutagenesis of an open reading frame therein, by the repair of the double-strands break by non-homologous end joining. In the absence of a repair matrix, the DNA double-strand break in an exon will be repaired essentially by the error-prone Non Homologous End Joining pathway NHEJ, resulting in small deletions (a few nucleotides) or small insertions (a few nucleotides), that will inactivate the cleavage site, and result in frame shift mutation.

[0224] In this case the use of the meganuclease comprises at least the step of: inducing in virus infected tissue(s) of the an individual a double stranded cleavage at a site of interest of in the Non-integrating Virus genome comprising at least one recognition and cleavage site of the meganuclease by contacting the cleavage site with the meganuclease, and thereby inducing mutagenesis of an open reading frame in the Non-integrating Virus genome by repair of the double-strands break by non-homologous end joining.

[0225] According to the present invention, said double-stranded cleavage may be induced, ex vivo by introduction of said meganuclease into infected cells isolated for instance from the circulatory system of the donor/individual and then transplantation of the modified cells back into the diseased individual.

[0226] The subject-matter of the present invention is also a method for preventing, improving or curing NIV infection and in particular a Herpes Simplex Virus Type 1 or Type 2 infection or Hepatitis B virus infection, in an individual in need thereof, said method comprising at least the step of administering to said individual a composition as defined above, by any means.

[0227] For purposes of therapy, the meganucleases and a pharmaceutically acceptable excipient are administered in a therapeutically effective amount. Such a combination is said to be administered in a “therapeutically effective amount” if the amount administered is physiologically significant. An agent is physiologically significant if its presence results in a detectable change in the physiology of the recipient. In the present context, an agent is physiologically significant if its presence results in a decrease in the severity of one or more symptoms of the targeted Non-integrating Virus and in particular Herpes Simplex Virus Type 1 or 2 infection.

[0228] In particular as far as possible the meganuclease comprising compositions should be non-immunogenic, i.e., engender little or no adverse immunological response. A variety of methods for ameliorating or eliminating deleterious immunological reactions of this sort can be used in accordance with the invention. One means of achieving this is to ensure that the meganuclease is substantially free of N-formyl methionine. Another way to avoid unwanted immunological reactions is to conjugate meganucleases to polyethylene glycol (“PEG”) or polypropylene glycol (“PPG”) (preferably of 500 to 20,000 Daltons average molecular weight (MW)). Conjugation with PEG or PPG, as described by Davis et al. (U.S. Pat. No. 4,179,337) for example, can provide non-immunogenic, physiologically active, water soluble endonuclease conjugates with anti-viral activity. Similar methods also using a polyethylene-polypropylene glycol copolymer are described in Saifer et al. (U.S. Pat. No. 5,006,333).

### DEFINITIONS

[0229] Throughout the present patent application a number of terms and features are used to present and describe the present invention, to clarify the meaning of these terms a number of definitions are set out below and wherein a feature or term is not otherwise specifically defined or obvious from its context the following definitions apply.
[0230] Amino acid residues in a polypeptide sequence are designated herein according to the one-letter code, in which, for example, Q means Gln or Glutamine residue, R means Arg or Arginine residue and D means Asp or Aspartic acid residue.
[0231] Amino acid substitution means the replacement of one amino acid residue with another, for instance the replacement of an Arginine residue with a Glutamine residue in a peptide sequence is an amino acid substitution.
[0232] Altered/enhanced/increased/improved cleavage activity, refers to an increase in the detected level of meganuclease cleavage activity, see below, against a target DNA sequence by a second meganuclease in comparison to the activity of a first meganuclease against the target DNA sequence. Normally the second meganuclease is a variant of the first and comprise one or more substituted amino acid residues in comparison to the first meganuclease.
[0233] by “beta-hairpin” it is intended two consecutive beta-strands of the antiparallel beta-sheet of a LAGLIDADG homing endonuclease core domain (β₁β₂ or β₃β₄) which are connected by a loop or a turn,
[0234] by “chimeric DNA target” or “hybrid DNA target” it is intended the fusion of a different half of two parent meganuclease target sequences. In addition at least one half of said target may comprise the combination of nucleotides which are bound by at least two separate subdomains (combined DNA target).
[0235] Cleavage activity: the cleavage activity of the variant according to the invention may be measured by any well-known, in vitro or in vivo cleavage assay, such as those described in the International PCT Application WO 2004/067736; Epinat et al., Nucleic Acids Res., 2003, 31, 2952-2962; Chames et al., Nucleic Acids Res., 2005, 33, e178; Arnould et al., J. Mol. Biol., 2006, 355, 443-458, and Arnould et al., J. Mol. Biol., 2007, 371, 49-65. For example, the cleavage activity of the variant of the invention may be measured by a direct repeat recombination assay, in yeast or mammalian cells, using a reporter vector. The reporter vector comprises two truncated, non-functional copies of a reporter gene (direct repeats) and the genomic (non-palindromic) DNA target sequence within the intervening sequence, cloned in a yeast or a mammalian expression vector. Usually, the genomic DNA target sequence comprises one different half of each (palindromic or pseudo-palindromic) parent homodimeric meganuclease target sequence. Expression of the heterodimeric variant results in a functional endonuclease which is able to cleave the genomic DNA target sequence. This cleavage induces homologous recombination between the direct repeats, resulting in a functional reporter gene (LacZ, for example), whose expression can be monitored by an appropriate assay. The specificity of the cleavage by the variant may be assessed by comparing the cleavage of the (non-palindromic) DNA target sequence with that of the two palindromic sequences cleaved by the parent homodimeric meganucleases or compared with wild type meganuclease.
[0236] by “selection or selecting” it is intended to mean the isolation of one or more meganuclease variants based upon an observed specified phenotype, for instance altered cleavage activity. This selection can be of the variant in a peptide form upon which the observation is made or alternatively the selection can be of a nucleotide coding for selected meganuclease variant.
[0237] by “screening” it is intended to mean the sequential or simultaneous selection of one or more meganuclease variant (s) which exhibits a specified phenotype such as altered cleavage activity.
[0238] by “derived from” it is intended to mean a meganuclease variant which is created from a parent meganuclease and hence the peptide sequence of the meganuclease variant is related to (primary sequence level) but derived from (mutations) the sequence peptide sequence of the parent meganuclease.
[0239] by “domain” or “core domain” it is intended the “LAGLIDADG homing endonuclease core domain” which is the characteristic α₁β₁β₂α₂β₃β₄α₃ fold of the homing endonucleases of the LAGLIDADG family, corresponding to a sequence of about one hundred amino acid residues. Said domain comprises four beta-strands (β₁β₂β₃β₄) folded in an antiparallel beta-sheet which interacts with one half of the DNA target. This domain is able to associate with another LAGLIDADG homing endonuclease core domain which interacts with the other half of the DNA target to form a functional endonuclease able to cleave said DNA target. For example, in the case of the dimeric homing endonuclease I-CreI (163 amino acids), the LAGLIDADG homing endonuclease core domain corresponds to the residues 6 to 94.
[0240] by “DNA target”, “DNA target sequence”, “target sequence”, “target-site”, “target”, “site”; “site of interest”; “recognition site”, “recognition sequence”, “homing recognition site”, “homing site”, “cleavage site” it is intended a 20 to 24 bp double-stranded palindromic, partially palindromic (pseudo-palindromic) or non-palindromic polynucleotide sequence that is recognized and cleaved by a LAGLIDADG homing endonuclease such as I-CreI, or a variant, or a single-chain chimeric meganuclease derived from I-CreI. These terms refer to a distinct DNA location, preferably a genomic location, at which a double stranded break (cleavage) is to be induced by the meganuclease. The DNA target is defined by the 5′ to 3′ sequence of one strand of the double-stranded polynucleotide, as indicated for C1221 (see FIG. 3, SEQ ID NO: 2). Cleavage of the DNA target occurs at the nucleotides at positions +2 and −2, respectively for the sense and the antisense strand. Unless otherwise indicated, the position at which cleavage of the DNA target by an I-CreI meganuclease variant occurs, corresponds to the cleavage site on the sense strand of the DNA target.
[0241] by “DNA target half-site”, “half cleavage site” or half-site” it is intended the portion of the DNA target which is bound by each LAGLIDADG homing endonuclease core domain.
[0242] by “DNA target sequence from the HBV genome” it is intended a 20 to 24 bp sequence of the HBV genome which is recognized and cleaved by a meganuclease variant. In particular the DNA target sequence from then HBV genome is in an essential gene sequence and/or within an essential regulatory sequence and/or within an essential structural sequence of the HBV genome.
[0243] by “DNA target sequence from the HSV genome” it is intended a 20 to 24 bp sequence of the HSV genome which is recognized and cleaved by a meganuclease variant. In particular the DNA target sequence from then HSV genome is in an essential gene sequence and/or within an essential regulatory sequence and/or within an essential structural sequence of the HSV genome.
[0244] by “first/second/third/n^{th} series of variants” it is intended a collection of variant meganucleases, each of which comprises one or more amino acid substitution in comparison to a parent meganuclease from which all the variants in the series are derived.
[0245] by “functional variant” it is intended a variant which is able to cleave a DNA target sequence, preferably said target is a new target which is not cleaved by the parent meganuclease. For example, such variants have amino acid variation at positions contacting the DNA target sequence or interacting directly or indirectly with said DNA target.
[0246] by “heterodimer” it is intended to mean a meganuclease comprising two non-identical monomers. In particular the monomers may differ from each other in their peptide sequence and/or in the DNA target half-site which they recognise and cleave.
[0247] by “homologous” is intended a sequence with enough identity to another one to lead to a homologous recombination between sequences, more particularly having at least 95% identity, preferably 97% identity and more preferably 99%.
[0248] by “I-CreI” it is intended the wild-type I-CreI having the sequence of pdb accession code 1g9y, corresponding to the sequence SEQ ID NO: 1 in the sequence listing.
[0249] by “I-CreI variant with novel specificity” it is intended a variant having a pattern of cleaved targets different from that of the parent meganuclease. The terms “novel specificity”, “modified specificity”, “novel cleavage specificity”, “novel substrate specificity” which are equivalent and used indifferently, refer to the specificity of the variant towards the nucleotides of the DNA target sequence. In the present patent application the I-CreI variants described comprise an additional Alanine after the first Methionine of the wild type I-CreI sequence and three additional amino acid residues (SEQ ID NO: 3). In the present Application, I-CreI variants may be homodimers (meganuclease comprising two identical monomers) or heterodimers (meganuclease comprising two non-identical monomers).

[0250] These variants also comprise two additional Alanine residues and an Aspartic Acid residue after the final Proline of the wild type I-CreI sequence. These additional residues do not affect the properties of the enzyme and to avoid confusion these additional residues do not affect the numeration of the residues in I-CreI or a variant referred in the present patent application, as these references exclusively refer to residues of the wild type I-CreI enzyme (SEQ ID NO: 1) as present in the variant, so for instance residue 2 of I-CreI is in fact residue 3 of a variant which comprises an additional Alanine after the first Methionine.
[0251] by “I-CreI site” it is intended a 22 to 24 bp double-stranded DNA sequence which is cleaved by I-CreI. I-CreI sites include the wild-type non-palindromic I-CreI homing site and the derived palindromic sequences such as the sequence 5′-t₋₁₂C₋₁₁a₋₁₀a₋₉a₋₈a₋₇c₋₆g₋₅t₋₄c₋₃g₋₂t₋₁a₊₁c₊₂g₊₃a₊₄c₊₅g₊₆t₊₇t₊₈t₊₉t₊₁₀g₊₁₁a₊₁₂ (SEQ ID NO: 2), also called C1221.
[0252] “identity” refers to sequence identity between two nucleic acid molecules or polypeptides. Identity can be determined by comparing a position in each sequence which may be aligned for purposes of comparison. When a position in the compared sequence is occupied by the same base, then the molecules are identical at that position. A degree of similarity or identity between nucleic acid or amino acid sequences is a function of the number of identical or matching nucleotides at positions shared by the nucleic acid sequences. Various alignment algorithms and/or programs may be used to calculate the identity between two sequences, including FASTA, or BLAST which are available as a part of the GCG sequence analysis package (University of Wisconsin, Madison, Wis.), and can be used with, e.g., default settings.
[0253] by “meganuclease”, it is intended an endonuclease having a double-stranded DNA target sequence of 12 to 45 bp. The meganuclease is either a dimeric enzyme, wherein each domain is on a monomer or a monomeric enzyme comprising the two domains on a single polypeptide.
[0254] by “meganuclease domain”, it is intended the region which interacts with one half of the DNA target of a meganuclease and is able to associate with the other domain of the same meganuclease which interacts with the other half of the DNA target to form a functional meganuclease able to cleave said DNA target.
[0255] by “meganuclease variant” or “variant” it is intended a meganuclease obtained by replacement of at least one residue in the amino acid sequence of the parent meganuclease with a different amino acid.
[0256] by “monomer” it is intended to mean a peptide encoded by the open reading frame of the I-CreI gene or a variant thereof, which when allowed to dimerise forms a functional I-CreI enzyme. In particular the monomers dimerise via interactions mediated by the LAGLIDADG motif.
[0257] by “mutation” is intended the substitution, deletion, insertion of one or more nucleotides/amino acids in a polynucleotide (cDNA, gene) or a polypeptide sequence. Said mutation can affect the coding sequence of a gene or its regulatory sequence. It may also affect the structure of the genomic sequence or the structure/stability of the encoded mRNA.
[0258] Nucleotides are designated as follows: one-letter code is used for designating the base of a nucleoside: a is adenine, t is thymine, u is uracile, c is cytosine, and g is guanine. For the degenerated nucleotides, r represents g or a (purine nucleotides), k represents g or t, s represents g or c, w represents a or t, m represents a or c, y represents t or c (pyrimidine nucleotides), d represents g, a or t, v represents g, a or c, b represents g, t or c, h represents a, t or c, and n represents g, a, t or c.
[0259] by “parent meganuclease” it is intended to mean a wild type meganuclease or a variant of such a wild type meganuclease with identical properties or alternatively a meganuclease with some altered characteristic in comparison to a wild type version of the same meganuclease. In the present invention the parent meganuclease can refer to the initial meganuclease from which the first series of variants are derived in step a. or the meganuclease from which the second series of variants are derived in step b., or the meganuclease from which the third series of variants are derived in step k.
[0260] by “peptide linker” it is intended to mean a peptide sequence of at least 10 and preferably at least 17 amino acids which links the C-terminal amino acid residue of the first monomer to the N-terminal residue of the second monomer and which allows the two variant monomers to adopt the correct conformation for activity and which does not alter the specificity of either of the monomers for their targets.
[0261] by “subdomain” it is intended the region of a LAGLIDADG homing endonuclease core domain which interacts with a distinct part of a homing endonuclease DNA target half-site.
[0262] by “single-chain meganuclease”, “single-chain chimeric meganuclease”, “single-chain meganuclease derivative”, “single-chain chimeric meganuclease derivative” or “single-chain derivative” it is intended a meganuclease comprising two LAGLIDADG homing endonuclease domains or core domains linked by a peptidic spacer. The single-chain meganuclease is able to cleave a chimeric DNA target sequence comprising one different half of each parent meganuclease target sequence.
[0263] by “single-chain obligate heterodimer”, it is intended a single-chain derived from an obligate heterodimer, as defined above.
[0264] by “targeting DNA construct/minimal repair matrix/repair matrix” it is intended to mean a DNA construct comprising a first and second portions which are homologous to regions 5′ and 3′ of the DNA target in situ. The DNA construct also comprises a third portion positioned between the first and second portion which comprise some homology with the corresponding DNA sequence in situ or alternatively comprise no homology with the regions 5′ and 3′ of the DNA target in situ, Following cleavage of the DNA target, a homologous recombination event is stimulated between the genome containing the Non-integrating Virus genome and the repair matrix, wherein the genomic sequence containing the DNA target is replaced by the third portion of the repair matrix and a variable part of the first and second portions of the repair matrix.
[0265] by “vector” is intended a nucleic acid molecule capable of trans-porting another nucleic acid to which it has been linked into a host cell in vitro, in vivo or ex vivo.

[0266] For a better understanding of the invention and to show how the same may be carried into effect, there will now be shown by way of example only, specific embodiments, methods and processes according to the present invention with reference to the accompanying drawings in which:

[0267] FIG. 1: HSV-1 genome schematic representation. Gene considered as accessory (upper) and essential (down) are represented from both parts of linear form of virus DNA.

[0268] FIG. 2: HSV-1 genome schematic representation with HSV2 and UL19 localization

[0269] FIG. 3: The HSV2 and C1221 I-CreI target sequences and their derivatives. 10AAA_P, 5CAC_P, 10AGG_P, 5GCC_P are close derivatives found to be cleaved by previously obtained I-CreI mutants. They differ from C1221 bp the boxed motives. C1221, 10AAA_P, 5CAC_P, 10AGG_P, 5GCC_P were first described as 24 bp sequences, but structural data suggest that only the 22 bp are relevant for protein/DNA interaction. However, positions ±12 are indicated in parenthesis. In the HSV2.2 target, the ACAC sequence in the middle of the target is replaced with GTAC, the bases found in C1221. HSV2.3 is the palindromic sequence derived from the left part of HSV2.2, and HSV2.4 is the palindromic sequence derived from the right part of HSV2.2. As shown in the Figure, the boxed motives from 10AAA_P, 5CAC_P, 10AGG_P, 5GCC_P are found in the HSV2 series of targets

[0270] FIG. 4: pCLS1055

[0271] FIG. 5: pCLS0542

[0272] FIG. 6: pCLS1107

[0273] FIG. 7: Cleavage of HSV2.2 and HSV2 by heterodimeric mutants from database. A. Secondary screening of combinations of I-CreI mutants with the HSV2.2. target. B. Secondary screening of the same combinations of I-CreI mutants with the HSV2 target.

[0274] FIG. 8: Improvement of HSV2.5 cleavage: A series of I-CreI N75 mutants cutting HSV2.3 and HSV2.5 were optimized by random mutagenesis. Cleavage is tested with the HSV2.5 target. Mutants displaying high specific cleavage activity of HSV2.5 (and HSV2.3) are circled. H10 is a negative control. H11 and H12 are positive controls.

[0275] FIG. 9: Improvement of HSV2.6 cleavage: A series of I-CreI N75 mutants cutting HSV2.4 and HSV2.6 were optimized by random mutagenesis. Cleavage is tested with the HSV2.6 target (panel A) and HSV2.4 (panel B). Mutants displaying specific cleavage activity of HSV2.6 (and HSV2.4) are circled. D10 is a negative control. D11 and D12 are positive controls.

[0276] FIG. 10: Cleavage of HSV2 by optimized heterodimeric mutants from random mutagenesis. Combinations displaying high cleavage activity of HSV2 are circled.

[0277] FIG. 11: pCLS1058

[0278] FIG. 12: pCLS2437

[0279] FIG. 13: pCLS2733 and pCLS2735

[0280] FIG. 14: pCLS1853

[0281] FIG. 15: pCLS0001

[0282] FIG. 16: pCLS2222 positive control expressing SCOH-RAG1.10 meganuclease.

[0283] FIG. 17: pCLS1069 (empty vector) and pCLS1090 (positive control expressing I-SceI)

[0284] FIG. 18: Example of activity cleavage in CHO cells of designed single chain SCOH-HSV2 variants compared to initial heterodimer, I-SceI and SCOH-RAG1.10 meganucleases as positive controls.

[0285] FIG. 19: Example of activity cleavage in CHO cells of single chain SCOH-HSV2 variants compared to initial heterodimer, I-Sce I and SCOH-RAG1.10 meganucleases as positive controls.

[0286] FIG. 20: Example of activity cleavage in CHO cells of single chain SCOH-HSV2-M1-105A132V-MC132V compared to initial heterodimer, I-SceI and SCOH-RAG1.10 meganucleases as positive controls.

[0287] FIG. 21: Example of activity cleavage in CHO cells of single chain SCOH-HSV2-M1-MC-80K105A132V (pCLS2459) compared to initial heterodimer, I-SceI and SCOH-RAG1.10 meganucleases as positive controls.

[0288] FIG. 22: Example of activity cleavage in CHO cells of single chain SCOH-HSV2-M1-MC-132V (pCLS2457) compared to initial heterodimer, I-SceI and SCOH-RAG1.10 meganucleases as positive controls.

[0289] FIG. 23: HSV-1 genome schematic representation with HSV4 and ICP0 (or RL2) genes localization

[0290] FIG. 24: The HSV4 and C1221 I-CreI target sequences and their derivatives. 10AAG_P, 5GGT_P, 5CAG_P, 10ACT_P are close derivatives found to be cleaved by previously obtained I-CreI mutants. They differ from C1221 by the boxed motives. C1221, 10AAG_P, 5GGT_P, 5CAG_P, 10ACT_P were first described as 24 bp sequences, but structural data suggest that only the 22 bp are relevant for protein/DNA interaction. However, positions ±12 are indicated in parenthesis. In the HSV4 target, the GTAC sequence in the middle of the target is found in C1221. HSV4.3 is the palindromic sequence derived from the left part of HSV4, and HSV4.4 is the palindromic sequence derived from the right part of HSV4. As shown in the figure, the boxed motives from 10AAG_P, 5GGT_P, 5CAG_P, 10ACT_P are found in the HSV4 series of targets

[0291] FIG. 25: Cleavage of HSV4 by heterodimeric combinations of mutants obtained after combinatorial process.

[0292] FIG. 26: Improvement of HSV4.3 cleavage: A series of I-CreI N75 mutants cutting HSV4.3 were optimized by random mutagenesis. Cleavage is tested with the HSV4.3 target. Mutants displaying high specific cleavage activity of HSV4.3 are circled. H10 is a negative control. H11 and H12 are positive controls.

[0293] FIG. 27: Improvement of HSV4.4 cleavage: A series of I-CreI N75 mutants cutting HSV4.4 were optimized by random mutagenesis. Cleavage is tested with the HSV4.4 target. 14 mutants displaying higher specific cleavage activity of HSV4.4 than best starting one are circled. H10 is a negative control. H11 and H12 are positive controls.

[0294] FIG. 28: Cleavage of HSV4 by optimized heterodimeric mutants from random mutagenesis. All combinations are displaying high cleavage activity of HSV4.

[0295] FIG. 29: pCLS1768

[0296] FIG. 30: pCLS2266 and pCLS2267

[0297] FIG. 31: pCLS0491

[0298] FIG. 32: pCLS2222, positive control expressing SCOH-RAG-CLS meganuclease under pCMV promoter, and pCLS2294, positive control expressing SCOH-RAG-CLS meganuclease under pEF1alpha promoter.

[0299] FIG. 33: Example of activity cleavage in CHO cells of designed single chain SCOH-HSV4 variants compared to initial heterodimer, I-Sce I and SCOH-RAG-CLS meganucleases as positive controls.

[0300] FIG. 34: Example of activity cleavage in CHO cells of single chain SCOH-HSV4 variants compared to initial heterodimer, I-Sce I and SCOH-RAG1.10 meganucleases as positive controls.

[0301] FIG. 35: Example of activity cleavage in CHO cells of single chain SCOH-HSV4-M2-54L-MF (pCLS2474) compared to initial heterodimer, I-SceI and SCOH-RAG-CLS meganucleases as positive controls.

[0302] FIG. 36: Example of activity cleavage in CHO cells of single chain SCOH-HSV4-M2-105A-MF-80K132V (pCLS2481) compared to initial heterodimer, I-SceI and SCOH-RAG-CLS meganucleases as positive controls.

[0303] FIG. 37: Example of activity cleavage in CHO cells of single chain SCOH-HSV4-M2-MF-132V (pCLS2472) compared to initial heterodimer, I-SceI and SCOH-RAG-CLS meganucleases as positive controls.

[0304] FIG. 38: Example of activity cleavage in CHO cells of single chain SCOH-HSV4-M2-MF (pCLS2470) compared to initial heterodimer, I-SceI and SCOH-RAG-CLS meganucleases as positive controls.

[0305] FIG. 39: Genomic structure of recombinant virus. The overall structure of the HSV-1 genome is shown with unique long (U_{L}) and unique short (U_{S}) regions flanked by inverted terminal repeats. The LAT region located in the terminal repeats has been expanded and the location of the LAT transcript are shown. An expression cassette containing the CMV promoter and the LacZ coding sequence was inserted in the major LAT gene. I-SceI target site was cloned between the CMV promoter and the LacZ gene.

[0306] FIG. 40: pCLS0126

[0307] FIG. 41: Example of inhibition of viral replication by I-CreI single chain obligate heterodimer variants cleaving HSV2, HSV4 or HSV12 target sequences. COS-7 cells were transfected with empty vector, plasmid expressing I-SceI or plasmid expressing I-CreI variants cleaving HSV2, HSV4 or HSV12 target sequences. Twenty-four hours later the transfected cells were infected with rHSV-1 which expresses the LacZ gene. Beta-galactosidase activity levels, indicative of LacZ gene expression, was assayed twenty-four hours after infection. The detected activity levels are depicted in the histogram with the percent activity compared to empty vector indicated below the histogram.

[0308] FIG. 42: Activity cleavage in CHO cells of single chain obligate heterodimer SCOH-HSV1-M5-132V-MF (pCLS2588), SCOH-HSV2-M1-MC-80K105A132V (pCLS2459), SCOH-HSV4-M2-105A-MF-80K132V (pCLS2790), SCOH-HSV8b562-B (pCLS3306), SCOH-HSV9-bu-F (pCLS3318) and SCOH-HSV12-M1-ME-132V (pCLS2633), I-SceI (pCLS1090) and SCOH-RAG-CLS (pCLS2222) meganucleases as positive controls.

[0309] FIG. 43: Evaluation of the toxicity of SCOH-HSV meganucleases by a cell survival assay in CHO cells. Various amounts of plasmid expressing I-Cre I variants cleaving HSV1, HSV2, HSV4, HSV8, HSV9 or HSV12 target sequences and a constant amount of plasmid encoding GFP were used to co-transfect CHO cells. Cell survival is expressed as the percentage of cells expressing GFP 6 days after transfection, as described in the ‘Materials and Methods’ section. I-SceI (pCLS1090) and mRag1 (pCLS2222) meganucleases are shown as a control for non-toxicity and I-Cre I (pCLS2220) is shown as a control for toxicity.

[0310] FIG. 44: Inhibition of viral replication by I-Cre I single chain obligate heterodimer variants cleaving HSV2, HSV4 or HSV12 target sequences. COS-7 cells were transfected with various amounts (0.3, 1, 5 and 10 μg) of empty vector or plasmid expressing I-Cre I variants. Twenty-four hours later the transfected cells were infected with rHSV-1 which expresses the LacZ gene at a MOI of 10⁻³. Beta-galactosidase activity levels, indicative of LacZ gene expression, was assayed twenty-four hours after infection. Results are expressed as the reduction of signal (in %) compared to the samples transfected with the same amount of empty vector.

[0311] FIG. 45: Inhibition of viral replication by I-Cre I single chain obligate heterodimer variants cleaving HSV2, HSV4 or HSV12 target sequences. COS-7 cells were transfected with various amounts (0.3, 1, 5 and 10 μg) of empty vector or plasmid expressing I-Cre I variants. Twenty-four hours later the transfected cells were infected with rHSV-1 at a MOI of 10⁻³. The percentage of reduction of viral DNA level was assessed 24 hours later by Q-PCR compared to the samples transfected with the same amount of empty vector.

[0312] FIG. 46: Meganuclease expression levels were analysed in COS-7 cells by western blotting at different times after transfection with various amounts (1 and 5 μg) of plasmid expressing I-Cre I variants using a rabbit polyclonal antibody against I-Cre I. Antibody against β-tubulin was used for the loading control.

[0313] FIG. 47: Distribution and frequencies of meganuclease-induced deletions and insertions (indels) in the rHSV-1 genome after treatment with HSV2 and HSV4 meganucleases. 10356 PCR products were sequenced for HSV2, and 12228 for HSV4. The total number (and frequency) of observed deletions or insertions is indicated in the Table XXXVI. We also sequenced 23527 PCR products for HSV2 and 16961 for HSV4, in the absence of meganuclease treatments and found 12 events for HSV2, and no indel for HSV4.

[0314] FIG. 48: Meganuclease-mediated inhibition of infection by a wild type HSV-1 virus. BSR cells were co-transfected with 1.5 μg of meganuclease expressing plasmid and 1.5 μg of a GFP expressing plasmid, and infected 48 hours later with various MOI (0.1, 0.5, 1, 2, 4, 8) of wild type HSV1 virus. Infection was assessed 8 hours later by immunocytochemistry with an antibody recognizing the gC viral glycoprotein, and we monitored the number of GFP+HSV1+, GFP+HSV 1−, GFP− HSV1+ and GFP− HSV1− cells. A representative panel of these four categories is featured on (A). For each transfection, we quantified the level of infection inhibition as the following ratio: (number of HSV1+ GFP− cells/number of GFP− cells)/number of HSV1+ GFP+ cells/number of GFP+ cells). The levels plotted on panel are the average of three independent experiments (B).

[0315] FIG. 49: represents target sequences of meganucleases described in Example 4.

[0316] FIG. 50: represents target sequences of meganucleases described in Example 5.

[0317] FIG. 51: represents target sequences of meganucleases described in Example 6.

[0318] FIG. 52: represents target sequences of meganucleases described in Example 7.

[0319] FIG. 53: Inhibition of viral replication by I-Cre I single chain obligate heterodimer variants cleaving HSV2, HSV4 or HSV12 target sequences at increased MOIs. A single concentration (5 μg) of meganuclease expression plasmid was introduced in COS-7 cells and infected 24 hours later with rHSV1 at a MOI of 10⁻³, 10⁻² or 10⁻¹. Viral load was monitored by by Q-PCR.

[0320] FIG. 54: Meganuclease-mediated inhibition of infection by a wild type HSV1 virus in COS-7 cells at increased MOIs. A single concentration (5 μg) of plasmid DNA expressing the I-Cre I variant cleaving HSV2 was introduced in COS-7 cells and infected 24 hours later with wt HSV1 at a MOI of 10⁻³ to 1. Viral load was monitored by Q-PCR.

[0321] FIG. 55: The HBV12 target sequences and its derivatives. 10ATT_P, 10TAG_P, 5TGG_P and 5CTT_P are close derivatives cleaved by previously obtained I-CreI variants. They differ from C1221 by the boxed motives. C1221, 10ATT_P, 10TAG_P, 5TGG_P and 5CTT_P were first described as 24 bp sequences, but structural data suggest that only the 22 bp are relevant for protein/DNA interaction. However, positions ±12 are indicated in parenthesis. HBV12 is the DNA sequence located at positions 2828-2850 of the Hepatitis B genome (accession number X70185). In the HBV 12.2 target, the GAAC sequence in the middle of the target is replaced with GTAC, the bases found in C1221. HBV12.3 is the palindromic sequence derived from the left part of HBV12.2, and HBV12.4 is the palindromic sequence derived from the right part of HBV12.2. As shown in the figure, the boxed motives from 10ATT_P, 10TAG_P, 5TGG_P and 5CTT_P are found in the HBV12 series of targets.

[0322] FIG. 56: Cleavage of HBV12.3 target by combinatorial variants. The figure displays an example of screening of I-CreI combinatorial variants with the HBV12.3 target. Each cluster contains 6 spots: In the 4 left spots, the yeast strain containing the HBV12.3 target mated with a variant from the combinatorial library described in Example 10. The right 2 spots are an internal control. On the filter, the sequence of the positive variants at positions A2 and A4 are KSRSQS/DYSSR and KSSNQS/DYSSR+66H, respectively, (according to the nomenclature of Table XXXXVIIII).

[0323] FIG. 57: Cleavage of HBV12.4 target by combinatorial variants. The Figure displays an example of screening of I-CreI combinatorial variants with the HBV12.4 target. Each cluster contains 6 spots: In the 4 left spots, the yeast strain containing the HBV12.4 target mated with a variant from the combinatorial library described in Example 11. The right 2 spots are an internal control. H10, H11 and H12 are negative and positive controls of different strength. On the filter, the sequence of the positive variants at positions A7, D1 and G11 are KNNCQS/RYSDN, KNHCQS/RYSNQ and KNHCQS/RYSYN, respectively, (according to the nomenclature of Table LI and Table LII).

[0324] FIG. 58: Cleavage of the HBV12 target sequences by heterodimeric combinatorial variants. The figure displays an example of screening of combinations of I-CreI variants against the HBV12 target. Each cluster contains 4 spots: In the 2 left spots, a yeast strain co-expressing an HBV12.3 and an HBV12.4 variant mated with a yeast strain containing the HBV12 target. The right 2 spots are an internal control. The heterodimers displaying the strongest signal with the HBV12 target are observed at positions D2 and D4, corresponding to yeast co-expressing the HBV12.3 variant KSSNQS/DYSSR+66H with the HBV 12.4 variants KNHCQS/RYSYN or KNHCQS/RYSNQ, respectively (according to the nomenclature of Table LIII).

[0325] FIG. 59: Cleavage of the HBV12 target. Example of screening against the HBV12 target of I-CreI refined variants obtained by random mutagenesis of initial variants cleaving HBV12.3 and co-expressed with a variant cutting HBV12.4. Each cluster contains 4 spots: In the 2 left spots, the yeast strain containing the HBV12 target and the HBV12.4 variant KNHCQS/RYSNQ mated with a different clone from the random mutagenesis library described in Example 13 (except for H10, H11 and H12: negative and positive controls of different strength). The top right spot is the HBV12.4 variant/HBV12 target strain mated with one of the initial HBV12.3 variants KSSNQS/DYSSR+66H (according to the nomenclature of Table L); the lower right spot is an internal control. On the filter, the sequence of the positive variants at positions A8 and B10 are 32Q, 38C, 44D, 68Y, 70S, 75S, 77R, 80A and 24F, 32Q, 38C, 44D, 68Y, 70S, 75S, 77R respectively.

[0326] FIG. 60: Cleavage of the HBV12 target. Example of screening against the HBV12 target of I-CreI refined variants obtained by site-directed mutagenesis of variants cleaving the HBV12.3 target and co-expressed with a variant cutting HBV12.4. Each cluster contains 6 spots: For the 4 left spots, each spot represents the yeast strain containing the HBV12 target and the HBV12.4 variant KNHCQS/RYSNQ mated with a different clone from the site-directed mutagenesis library described in Example 14. The top right spot is the HBV12.4 variant/HBV12 target strain mated with one of the HBV12.3 optimized variants 32Q,38C,44D,68Y,70S,75S,77R,80A (Table LIV); the lower right spot is an internal control. H10, H11 and H12 are negative and positive controls of different strength. The sequence of the positive variants at positions A1, A8 and C10 are 24F,32Q,38C,44D,68Y,70S,75S,77R,80K; 24F,32Q,38C,44D,68Y,70S,75S,77R,87L,153G and 24F,32Q,38C,44D,68Y,70S,75S,77R,105A,132V, respectively.

[0327] FIG. 61: Cleavage of the HBV12 target. Example of screening against the HBV12 target of I-CreI refined variants obtained by site-directed mutagenesis of variants cleaving the HBV12.4 target and co-expressed with a variant cutting HBV12.3. Each cluster contains 4 spots: In the 2 left spots, the yeast strain containing the HBV12 target and the HBV12.3 variant KSRSQS/DYSSR mated with a different clone from the site-directed mutagenesis library described in Example 13. The top right spot is the HBV 12.3 variant/HBV12 target strain mated with one of the initial HBV12.4 variants KNHCQS/RYSNQ (according to the nomenclature of Table LII); the lower right spot is an internal control. H10, H11 and H12 are negative and positive controls of different strength. The sequence of the positive variants at positions A12, F9, and G1 are 32H,33C,40R,44R,68Y,70S,75N,77Q; 32H,33C,44R,68Y,70S,75Y,77Q,87L and 19S,32H,33C,44R,68Y,70S,75D77R, respectively.

[0328] FIG. 62: The HBV8 target sequences and its derivatives. 10TGA_P, 10CAA_P, 5CTT_P and 5TCT_P are close derivatives cleaved by previously obtained I-CreI variants. They differ from C1221 by the boxed motives. C1221, 10TGA_P, 10CAA_P, 5CTT_P and 5TCT_P were first described as 24 bp sequences, but structural data suggest that only the 22 bp are relevant for protein/DNA interaction. However, positions ±12 are indicated in parenthesis. HBV8 is the DNA sequence located at positions 1908-1929 of the Hepatitis B genome (accession number X70185). In the HBV8.2 target, the ATAA sequence in the middle of the target is replaced with GTAC, the bases found in C1221. HBV8.3 is the palindromic sequence derived from the left part of HBV8.2, and HBV8.4 is the palindromic sequence derived from the right part of HBV8.2. As shown in the Figure, the boxed motives from 10TGA_P, 10CAA_P, 5CTT_P and 5TCT_P are found in the HBV8 series of targets.

[0329] FIG. 63: Cleavage of HBV8.3 target by combinatorial variants. The Figure displays an Example of screening of I-CreI combinatorial variants with the HBV8.3 target. Each cluster contains 4 spots: In the 2 left spots, the yeast strain containing the HBV8.3 target mated with a variant from the combinatorial library described in Example 17. The right 2 spots are an internal control. On the filter, the sequence of the positive variants at positions A3, A12 and F9 are KNSCRS/RYSDN, KHSCHS/RYSYN and KNSARS/RYSDN, respectively, (according to the nomenclature of Table LXIII).

[0330] FIG. 64: Cleavage of HBV8.4 target by combinatorial variants. The Figure displays an Example of screening of I-CreI combinatorial variants with the HBV8.4 target. Each cluster contains 4 spots: In the 2 left spots, the yeast strain containing the HBV8.4 target mated with a variant from the combinatorial library described in Example 18. The right 2 spots are an internal control. On the filter, the sequence of the positive variants at positions A1, A2 are KNSHQQ/QRSNK and KNSHQQ/QRSNK+163Q, respectively, (according to the nomenclature of Table LIX and Table LX).

[0331] FIG. 65: pCLS1884 plasmid map.

[0332] FIG. 66: Cleavage of HBV8.4 target by combinatorial variants containing 105A and 132V mutations. The figure displays an example of screening of I-CreI combinatorial variants with the HBV8.4 target. Each cluster contains 4 spots: In the 2 left spots, the yeast strain containing the HBV8.4 target mated with a variant from the combinatorial library containing the 105A and 132V substitutions described in Example 19. The right 2 spots are an internal control. On the filter, the sequence of the positive variants at positions A1, A2, A3 and A4 are KNSHQQ/KASNI+105A132V, KNEYQS/QSSNR+105A132V, KNEYQS/QASNR+105A132V and KNSHQQ/KNANI+105A132V respectively, (according to the nomenclature of Table LXI).

[0333] FIG. 67: Cleavage of the HBV8 target. Example of screening against the HBV8 target of I-CreI refined variants obtained by random mutagenesis of initial variants cleaving HBV8.4 and co-expressed with a variant cutting HBV8.3. Each cluster contains 6 spots: In the 4 left spots, the yeast strain containing the HBV8 target and the HBV8.3 variant KNSCRS/RYSDN mated with two different clones from the random mutagenesis library (clone 1, upper left and middle spots; clone 2, lower left and middle spots) described in Example 20. H10, H11 and H12: negative and positive controls of different strength. The 2 right spots are an internal control. On the filter, the sequence of the positive variants at positions A3 and A9 are 33H,40Q,70S,75N,77K,105A,132V and 33H,40Q,68A,70S,75N,77R,105A,132V, respectively.

[0334] FIG. 68: Cleavage of the HBV8 target. Example of screening against the HBV8 target of I-CreI refined variants obtained by site-directed mutagenesis of variants cleaving the HBV8.4 target and co-expressed with a variant cutting HBV8.3. Each cluster contains 4 spots: In the 2 left spots, the yeast strain containing the HBV8 target and the HBV8.3 variant KNSCRS/RYSDN mated with a different clone from the site-directed mutagenesis library described in Example 21. The top right spot is the HBV8.3 variant/HBV8 target strain mated with one of the optimized HBV8.4 variants 33H,40Q,70S,75N,77K,105A,132V (according to the nomenclature of Table LXIV); the lower right spot is an internal control. H10, H11 and H12 are negative and positive controls of different strength. The sequence of the positive variants at positions C11, D10, and G8 are 19S,33H,40Q,70S,75N,77K,105A,132V; 19S,33H,40Q,70S,75N,77K,105A and 19S,33H,40Q,43I,70S,75N,77K,105A,132V, respectively.

[0335] FIG. 69: HBV8 target cleavage in CHO cells. Extrachromosomal assay in CHO cells for heterodimers displaying strong cleavage activity against the HBV8 target as described in Example 20. OD values indicated were observed 3 hours after lysis/revelation buffer addition. HD1 represents the results obtained with co-expression of the HBV8.3 variant 33C,38R,44R,68Y,70S,77N with HBV8.4 variant 19S,33H,40Q,43I,70S,75N,77K,105A,132V. HD2 represents the results obtained with co-expression of the HBV8.3 variant 33C,38R,44R,68Y,70S,77N and HBV8.4 variant 19S,33H,40Q,70S,75N,77K,105A,132V. I-SceI and empty vector are presented as positive and negative controls, respectively.

[0336] FIG. 70: The HBV3 target sequences and its derivatives. 10TGC_P, 10TCT_P, 5TAC_P and 5TCC_P are close derivatives cleaved by previously obtained I-CreI variants. They differ from C1221 by the boxed motives. C1221, 10TGC_P, 10TCT_P, 5TAC_P and 5TCC_P were first described as 24 bp sequences, but structural data suggest that only the 22 bp are relevant for protein/DNA interaction. However, positions ±12 are indicated in parenthesis. HBV3 is the DNA sequence located at positions 2216-2237 of the Hepatitis B genome (accession number M38636). In the HBV3.2 target, the TTTT sequence in the middle of the target is replaced with GTAC, the bases found in C1221. HBV3.3 is the palindromic sequence derived from the left part of HBV3.2, and HBV3.4 is the palindromic sequence derived from the right part of HBV3.2. HBV3.5 and HBV3.6 are pseudo-palindromic targets similar to HBHV3.3 and HBV3.4 except that they contain the tttt sequence at positions −2 to 2. As shown in the figure, the boxed motives from 10TGC_P, 10TCT_P, 5TAC_P and 5TCC_P are found in the HBV3 series of targets.

[0337] FIG. 71: Cleavage of HBV3.3 target by combinatorial variants. The figure displays an example of screening of I-CreI combinatorial variants with the HBV3.3 target. Each cluster contains 4 spots: In the 2 left spots, the yeast strain containing the HBV3.3 target mated with a variant from the combinatorial library described in Example 24. The right 2 spots are an internal control. On the filter, the sequence of the positive variants at positions C9, D8 and H8 are KNSCRS/AYSRT, KNSSRQ/AYSRI and KNSCSS/NYSRY, respectively, (according to the nomenclature of Table LXIV and LXV).

[0338] FIG. 72: Cleavage of HBV3.4 target by combinatorial variants. The figure displays an example of screening of I-CreI combinatorial variants with the HBV3.4 target. Each cluster contains 4 spots: In the 2 left spots, the yeast strain containing the HBV3.4 target mated with a variant from the combinatorial library described in Example 25. The right 2 spots are an internal control. On the filter, the sequence of the positive variants at positions C1, E3 and G8 are KNSCYS/KYSNV+45M, KNSSYS/KHNNI and KNSGYS/KYSNV+45M, respectively, (according to the nomenclature of Table LXVI and Table LXVII).

[0339] FIG. 73: Cleavage of the HBV3.2 target sequences by heterodimeric combinatorial variants. The figure displays an example of screening of combinations of I-CreI variants against the HBV3.2 target. Each cluster contains 4 spots: In the 2 left spots; a yeast strain co-expressing the HBV3.3 and HBV3.4 combinatorial variants was mated with a yeast strain containing the HBV3 target as described in Example 26. The right 2 spots are an internal control. All heterodimers tested resulted in strong cleavage of the HBV3.2 target.

[0340] FIG. 74: Cleavage of the HBV3.5 target. Example of screening against the HBV3.5 target of I-CreI refined variants obtained by random mutagenesis of initial variants cleaving HBV8.3. Each cluster contains 4 spots: In the 2 left spots, the yeast strain containing the HBV8.5 target mated with a clone from the random mutagenesis library described in Example 27. H10, H11 and H12: negative and positive controls of different strength. The top right spot is the HBV3.5 target strain mated with one of the initial HBV3.3 variants KNSCRS/AYSRT (according to the nomenclature of Table LXV). The right lower spot is an internal control. On the filter, the sequence of the positive variants at positions A4 and F12 are 26R,33C,38S,44N,68Y,70S,75R,77Y,81T and 33C,38R,44A,68Y,70S,75R,77T,132V, respectively.

[0341] FIG. 75: Cleavage of the HBV3.6 target. Example of screening against the HBV3.6 target of I-CreI refined variants obtained by random mutagenesis of initial variants cleaving HBV8.4. Each cluster contains 4 spots: In the 2 left spots, the yeast strain containing the HBV8.6 target mated with two different clones from the random mutagenesis library described in Example 28. H10, H11 and H12: negative and positive controls of different strength. The top right spot is the HBV3.6 target strain mated with one of the initial HBV3.4 variants KNSGYS/KYSNY (according to the nomenclature of Table LXVI). The right lower spot is an internal control. On the filter, the sequence of the positive variants at positions B1 and G4 are 33C,38Y,44K,64I,68Y,70S,75N,77Y,85Rand 33 S,38Y,44K,45M,68Y,70S,75N,77V,86T, respectively.

[0342] FIG. 76: Cleavage of the HBV3 target sequences by optimized heterodimeric variants. The figure displays an example of screening of I-CreI variants against the HBV3 target. Each cluster contains 4 spots: In the 2 left spots and the upper right spot, a yeast strain co-expressing an HBV3.3 and an HBV3.4 variant mated with a yeast strain containing the HBV3 target. The lower right spot is an internal control. The heterodimers displaying the strongest signal with the HBV3 target are observed at positions A1 and A11, corresponding to yeast co-expressing the HBV3.3 variant 26R,33C,38S,44N,68Y,70S,75R,77Y,81T with the HBV3.4 variants 33 S,38Y,44K,68Y,70S,75N,77L and 2D,33S,38Y,44K,68Y,70S,75N,77Y,140M, respectively.

[0343] FIG. 77: Cleavage of the HBV3 target. Example of secondary screening against the HBV3 target of I-CreI refined variants obtained by random mutagenesis of variants cleaving the HBV3.4 target and co-expressed with a variant cutting HBV3.3. Extrachromosomal assay in CHO cells for heterodimers displaying cleavage activity against the HBV3 target as described in Example 30. HBV3.4 variants, both the initial (33S,38Y,44K,68Y,70S,75N,77L) and optimized (see Table LXXII) variants, were co-expressed with the HBV3.3 variant 26R,33C,38S,44N,68Y,70S,75R,77Y,81T and examined for their ability to cleave the HBV3 target. OD values indicated were observed 3 hours after lysis/revelation buffer addition. I-SceI is presented as a positive control.

[0344] FIG. 78: Cleavage of the HBV3 target. Example of secondary screening against the HBV3 target of I-CreI refined variants obtained by random mutagenesis of variants cleaving the HBV3.3 target and co-expressed with a variant cutting HBV3.4. Extrachromosomal assay in CHO cells for heterodimers displaying cleavage activity against the HBV3 target as described in Example 31. HBV3.3 variants, both the initial (26R,33C,38S,44N,68Y,70S,75R,77Q,81T) and optimized (see Table LXXIII) variants, were co-expressed with the HBV3.4 variant 19S,33C,38Y,44K,68Y,70S,75N,77Q and examined for their ability to cleave the HBV3 target. OD values indicated were observed 3 hours after lysis/revelation buffer addition. I-SceI is presented as a positive control.

[0345] FIG. 79: Cleavage of the HBV3 target. Example of secondary screening against the HBV3 target of I-CreI refined variants obtained by site-directed mutagenesis. Extrachromosomal assay in CHO cells for heterodimers displaying cleavage activity against the HBV3 target as described in Example 32. HBV3.3 variant containing site-directed mutations (3.3_R5) was co-expressed with either the initial HBV3.4 variant (3.4_A7) or one of four HBV3.4 variants containing site-directed mutations (3.4_R2, 3.4_R4, 3.4_R5, 3.4_R6; see Table LXXIV) variants, and examined for their ability to cleave the HBV3 target in comparison to the original HBV3 heterodimer (3.3_F1/3.4_A7). OD values indicated were observed 3 hours after lysis/revelation buffer addition. I-SceI is presented as a positive control.

[0346] FIG. 80: Cleavage of the HBV3 target. Example of screening of I-CreI single chain molecules for cleavage activity against the HBV3 target. Extrachromosomal assay in CHO cells for single chain molecules displaying cleavage activity against the HBV3 target as described in Example 33. Two single-chain molecules (SC_{—}34 and SC_OH_{—}34) were examined for their ability to cleave the HBV3 target in comparison to the HBV3 heterodimer (3.3_R5/3.4_R4). OD values indicated were observed 3 hours after lysis/revelation buffer addition. I-SceI and empty vector are presented as positive and negative controls, respectively.

[0347] FIG. 81: shows schematic representation of HBV as an enveloped DNA-containing virus. The viral particle consists of an inner core plus an outer surface coat.

[0348] FIG. 82: shows a schematic representation of the HBV genome.

[0349] FIG. 83: shows a structural representation of a LAGLIDADG enzyme in combination with its DNA target.

[0350] FIG. 84: shows a schematic representation of the coding sequences present in the HBV genome and the HBV3, 8 and 12 targets identified in the HBV genome for which meganuclease variants according to the present invention have been made.

[0351] FIG. 85: pCLS0003 plasmid map.

[0352] FIG. 86: Cleavage activity in CHO cells of single chain obligate heterodimer SCOH-HBV12-B1 (pCLS2862), SCOH-HBV 12-B2 (pCLS2865), SCOH-HBV12-B2 (pCLS2868) meganucleases as well as I-SceI (pCLS1090) and SCOH-RAG-CLS (pCLS2162) meganucleases as positive controls.

[0353] FIG. 87: pCLS3469 plasmid map.

[0354] FIG. 88: Cleavage activity in HepG2 cells of single chain obligate heterodimer SCOH-HBV12-B1 (pCLS2862), SCOH-HBV 12-B2 (pCLS2865), SCOH-HBV12-B2 (pCLS2868) meganucleases as well as I-SceI (pCLS1090). LacZ activities observed after transfection of different quantities (3-11 μg) of an SCOH-HBV12 expression plasmid and a fixed quantity (100 ng) of either a LacZ episomal substrate containing the HBV12 site (LacZ+target) or a LacZ substrate without the target site (LacZ) are depicted. The percent decrease in LacZ activity observed with the target substrate for each condition is indicated.

[0355] FIG. 89: pCLS0002 plasmid map.

[0356] FIG. 90: construct 1A plasmid map.

[0357] FIG. 91: construct 2A plasmid map.

[0358] FIG. 92: pCLS4695 plasmid map.

[0359] FIG. 93: pCLS4696 plasmid map.

[0360] FIG. 94: pCLS4693 plasmid map.

[0361] FIG. 95: pCLS4694 plasmid map.

[0362] FIG. 96: construct 1B plasmid map.

[0363] FIG. 97: construct 2B plasmid map.

[0364] FIG. 98: pCLS4492 plasmid map.

[0365] FIG. 99: pCLS4513 plasmid map.

[0366] FIG. 100: pCLS4604 plasmid map.

[0367] FIG. 101: pCLS4605 plasmid map.

[0368] FIG. 102: pCLS4863 plasmid map.

[0369] FIG. 103: Expression of single chain obligatory heterodimer SCOH-HBV12-B1 in HepG2 cells. Meganuclease expression levels were analyzed in HepG2 cells by western blotting at 48 h after transfection with various amounts of plasmid (1 and 5 μg). Antibody against β-tubulin was used for the loading control. Indicated are signal intensities as compared to the positive control pCLS2862.

[0370] FIG. 104: Expression of single chain obligatory heterodimer SCOH-HBV12-B1 in 293H cells. Meganuclease expression levels were analyzed in 293H cells by western blotting at 48 h after transfection with various amounts of plasmid (1 and 5 μg). Antibody against β-tubulin was used for the loading control.

[0371] FIG. 105: Cleavage activity of hepatocyte-specific SCOH-HBV12-B1 expression constructs pCLS4695, pCLS4696, pCLS4693, pCLS4694, pCLS4492, pCLS4513, pCLS4604, pCLS4605, pCLS4863 as well as the positive control pCLS2862 and the negative control pCLS003, Indicated are LacZ activities observed after transfection of 11 μg of an SCOH-HBV12 expression plasmid and a fixed quantity (100 ng) of either a LacZ episomal substrate containing the HBV12 site (LacZ+target) or a LacZ substrate without the target site (LacZ). The percent decrease in LacZ activity observed with the target substrate for each condition is indicated.

### EXAMPLE 1

### Strategy for Engineering Novel Meganucleases Cleaving Target from the UL₁₉ Gene in HSV-1 Genome

[0372] HSV2 is a 24 bp (non-palindromic) target (SEQ ID NO: 24) present in the UL19 gene encoding the HSV-1 major capsid protein. This 5.7 kb gene is present in one copy at position 35023 to 40768 of the UL region. The HSV1-major capsid protein is expressed without maturation from an ORF located from 36404 to 40528. The target HSV2 is located from nucleotide 36966 to 36989 (accession number NC_{—}001806; FIG. 2).

[0373] The 10AAA_P, 5CAC_P, 10AGG_P, 5GCC_P targets sequences are 24 bp derivatives of C1221, a palindromic sequence cleaved by I-CreI (Arnould et al., precited). However, the structure of I-CreI bound to its DNA target suggests that the two external base pairs of these targets (positions −12 and 12) have no impact on binding and cleavage (Chevalier et al., Nat. Struct. Biol., 2001, 8, 312-316; Chevalier and Stoddard, Nucleic Acids Res., 2001, 29, 3757-3774; Chevalier et al., J. Mol. Biol., 2003, 329, 253-269), and in this study, only positions −11 to 11 were considered. Consequently, the HSV2 series of targets were defined as 22 bp sequences instead of 24 bp. HSV2 differs from C1221 in the 4 by central region. According to the structure of the I-CreI protein bound to its target, there is no contact between the 4 central base pairs (positions −2 to 2) and the I-CreI protein (Chevalier et al., Nat. Struct. Biol., 2001, 8, 312-316; Chevalier and Stoddard, Nucleic Acids Res., 2001, 29, 3757-3774; Chevalier et al., J. Mal. Biol., 2003, 329, 253-269). Thus, the bases at these positions should not impact the binding efficiency. However, they could affect cleavage, which results from two nicks at the edge of this region. Thus, the ACAC sequence in −2 to 2 was first substituted with the GTAC sequence from C1221, resulting in target HSV2.2 (FIG. 3). Then, two palindromic targets, HSV2.3 and HSV2.4, were derived from HSV2.2 (FIG. 3). Since HSV2.3 and HSV2.4 are palindromic, they should be cleaved by homodimeric proteins. Thus, proteins able to cleave the HSV2.3 and HSV2.4 sequences as homodimers were first designed (Examples 1.1 and 1.2) and then co-expressed to obtain heterodimers cleaving HSV2 (Example 1.3). Heterodimers cleaving the HSV2.2 and HSV2 targets could be identified. In order to improve cleavage activity for the HSV2 target, a series of variants cleaving HSV2.3 and HSV2.4 was chosen, and then refined. The chosen variants were subjected to random mutagenesis, and used to form novel homodimers (Examples 1.4 and 1.5). Several improved mutants were then chosen to form heterodimers that were screened against the HSV2 target (Example 1.6). Heterodimers could be identified with an improved cleavage activity for the HSV2 target. Chosen heterodimers were then cloned into mammalian expression vectors for HSV2 cleavage in CHO cells (Example 1.7). These results were then utilized to design single chain molecules directed against the HSV2 target that were cloned into mammalian expression vectors and tested for HSV2 cleavage in CHO cells (Example 1.8). Strong cleavage activity of the HSV2 target could be observed for these single chain molecules in mammalian cells.

### EXAMPLE 1.1

### Identification of Meganucleases Cleaving HSV2.3 and HSV2.5 Targets

[0374] This Example shows that I-CreI variants can cut the HSV2.3 and HSV2.5 DNA target sequences derived from the left part of the HSV2 target in a palindromic form. Target sequences described in this Example are 22 bp palindromic sequences. Therefore, they will be described only by the first 11 nucleotides, followed by the suffix _P (For Example, target HSV2.3 will be noted HSV2.3 TAAACTCACGT_P SEQ ID NO: 10).

[0375] HSV2.3 and HSV2.5 are similar to 10AAA_P at positions ±10, ±9, ±8 and to 5CAC_P at positions ±5, ±4, ±3. It was hypothesized that positions ±7 and ±11 would have little effect on the binding and cleavage activity. Variants able to cleave 10AAA-5CAC_P target were previously obtained by mutagenesis on I-CreI N75 at positions 24, 44, 68, 70, 75 and 77 as described in Arnould et al., 3. Mol. Biol., 2006, 355, 443-458; Smith et al. Nucleic Acids Res., 2006, 34, e149; International PCT Applications WO 2006/097784, WO 2006/097853, WO 2007/060495 and WO 2007/049156. 192 of these variants were stored in our database and ready to be assayed for HSV2.3 and HSV2.5 cleavage.

### A) Material and Methods

### a) Construction of Target Vector

[0376] The target was cloned as follows: an oligonucleotide corresponding to the HSV2.3 and HSV2.5 targets sequences flanked by gateway cloning sequences was ordered from PROLIGO: HSV2.3 5′TGGCATACAAGTTTATAAACTCACGTACGTGAGTTTATCAATCGTCTGTC A3′ (SEQ ID NO: 38); HSV2.5 5′TGGCATACAAGTTTATAAACTCACACACGTGAGTTTATCAATCGTCTGTC A3′ (SEQ ID NO: 39). Double-stranded target DNA, generated by PCR amplification of the single stranded oligonucleotide, was cloned using the Gateway protocol (INVITROGEN) into the yeast reporter vector (pCLS1055, FIG. 4). Yeast reporter vector was transformed into Saccharomyces cerevisiae strain FYBL2-7B (MAT a, ura3Δ851, trp1Δ63, leu2Δ1, lys2Δ202), resulting in a reporter strain. (MilleGen)

### b) Mating of Meganuclease Expressing Clones and Screening in Yeast

[0377] Screening of variants from our data bank was performed as described previously (Arnould et al., J. Mol. Biol., 2006, 355, 443-458). Mating was performed using a colony gridder (QpixII, GENETIX). Variants were gridded on nylon filters covering YPD plates, using a low gridding density (4-6 spots/cm²). A second gridding process was performed on the same filters to spot a second layer consisting of the reporter-harboring yeast strain. Membranes were placed on solid agar YPD rich medium, and incubated at 30° C. for one night, to allow mating. Next, filters were transferred to synthetic medium, lacking leucine and tryptophan, with galactose (2%) as a carbon source, and incubated for five days at 37° C., to select for diploids carrying the expression and target vectors. After 5 days, filters were placed on solid agarose medium with 0.02% X-Gal in 0.5 M sodium phosphate buffer, pH 7.0, 0.1% SDS, 6% dimethyl formamide (DMF), 7 mM β-mercaptoethanol, 1% agarose, and incubated at 37° C., to monitor β-galactosidase activity. Results were analyzed by scanning and quantification was performed using appropriate software.

### B) Results

[0378] Examples of variants able to cleave 10AAA-5CAC_P target are displayed in Table VIII. Among 192 unique variants, 156 clones were found on HSV2.3 which correspond to 156 different endonucleases (Table IX), 55 of them where able to cut HSV2.5 as well. Examples of positives are shown in Table IX.

TABLE VIII
Panel of variants extracted from our database

| Amino acids positions and residues | |
|---|---|
| of the I-CreI variants | SEQ ID NO: |
| 44N70S75R77Y/ | 40 |
| 44V68E75N77R/24V80K | 41 |
| 44N68E70S75R77K/ | 42 |
| 44K68Q/ | 43 |
| 44R68T/ | 44 |
| 44N68Y70S75R77V/ | 45 |
| 44A70S75R77Y/24V | 46 |
| 44N70S75R77N/ | 47 |
| 44A70S75R77Y/ | 48 |
| 44N68E70S75R77R/ | 49 |
| 44R68N/ | 50 |
| 44K68A/ | 51 |
| 444N70S75R77N/24V | 52 |
| 44T68E70S75R77R/ | 53 |
| 44A68Y70S75Y77K/ | 54 |
| 44N68Y70S75R77Y/ | 55 |
| 44A70S75R77L/ | 56 |
| 44T68K70S75R77R/ | 57 |
| 44N68Y70S75R/ | 58 |
| 44N68E70S75R77R/24V | 59 |
| 44A68Y70S75R/24V | 60 |
| 44N68Y70S75R77V/24V | 61 |
| 44K68H70S75N/ | 62 |
| 44R68A/ | 63 |
| 44N68A70S75R77Y/ | 64 |
| 44D68A70S75K77R/ | 65 |
| 44R68Y70S75N77T/24V | 66 |
| 44R68Y70S75N/24V | 67 |
| 44A68Y70S75R/ | 68 |
| 44I68E75N77R/24V | 69 |
| 44N70S75R/ | 70 |
| 44T68E70S75R77R/24V | 455 |
| 44R68Y70S75Y77T/24V | 456 |
| 44N68Y70S75R77Q/ | 457 |
| 44N68Y70S75Y77K/24V | 458 |
| 44N68K70S75R77N/ | 459 |
| 44R68Y70S75Y77N/ | 460 |
| 44R68H/ | 461 |
| 44A68Y70S75R77V/24V | 462 |
| 44S68E70S75R77K/24V | 463 |

TABLE IX
I-CreI variants capable of cleaving the HSV2.3
as well as HSV2.5 DNA targets.

| Amino acids positions and residues | |
|---|---|
| of the I-CreI variants | SEQ ID NO: |
| 44N68Y70S75R77Y/ | 71 |
| 44A68Y70S75R/ | 72 |
| 44N70S75R77Y/ | 73 |
| 44N68Y70S75R/ | 74 |
| 44T68T70S75K77E/ | 75 |
| 24V44T68T70S75K77E/ | 76 |
| 44N70S75R77N/ | 77 |
| 44A70S75R77Y/ | 78 |
| 44R68A/ | 79 |
| 44R68T/ | 80 |
| 24V44N68Y70S75Y77R/ | 81 |
| 44N68A70S75R77Y/ | 82 |
| 44N68Y70S75R77V/ | 83 |
| 44N68T70S75R77Y/ | 84 |
| 44T68Y70S75Y77R/ | 85 |
| 44A68Y70S75R77R/ | 86 |
| 44N68Y70S75Y77R/ | 87 |
| 44K68A/ | 88 |
| 44R68H/ | 89 |
| 44A68T70S75Q77R/ | 90 |

### EXAMPLE 1.2

### Identification of Meganucleases Cleaving HSV2.4 and HSV2.6

[0379] This Example shows that I-CreI variants can cleave the HSV2.4 and HSV2.6 DNA target sequences derived from the right part of the HSV2 target in a palindromic form (FIG. 3). All target sequences described in this Example are 22 bp palindromic sequences. Therefore, they will be described only by the first 11 nucleotides, followed by the suffix _P (for Example, HSV2.4 will be called CAGGACGCCGT_P).

### A) Material and Methods

### a) Construction of Target Vector

[0380] The experimental procedure is as described in Example 1.1, with the exception that an oligonucleotide corresponding to the HSV2.4 and HSV2.6 target sequences were used: 5′ TGGCATACAAGTTTCCAGGACGCCGTACGGCGTCCTGGCAATCGTCTGTCA 3′ (SEQ ID NO: 91). and 5′TGGCATACAAGTTTCCAGGACGCCACACGGCGTCCTGGCAATCGTCTGT CA3′ (SEQ ID NO: 92) (resp. HSV2.4 and HSV2.6)

### b) Mating of Meganuclease Expressing Clones and Screening in Yeast

[0381] Screening was performed as described previously (Arnould et al., J. Mol. Biol., 2006, 355, 443-458). Mating was performed using a colony gridder (QpixII, GENETIX). Variants were gridded on nylon filters covering YPD plates, using a low gridding density (4-6 spots/cm²). A second gridding process was performed on the same filters to spot a second layer consisting of the reporter-harboring yeast strain. Membranes were placed on solid agar YPD rich medium, and incubated at 30° C. for one night, to allow mating. Next, filters were transferred to synthetic medium, lacking tryptophan, adding G418, with galactose (2%) as a carbon source, and incubated for five days at 37° C., to select for diploids carrying the expression and target vectors. After 5 days, filters were placed on solid agarose medium with 0.02% X-Gal in 0.5 M sodium phosphate buffer, pH 7.0, 0.1% SDS, 6% dimethyl formamide (DMF), 7 mM β-mercaptoethanol, 1% agarose, and incubated at 37° C., to monitor β-galactosidase activity. Results were analyzed by scanning and quantification was performed using appropriate software. Positives resulting clones were verified by sequencing (MILLEGEN) as described in Example 1.1.

### B) Results

[0382] Examples of variants able to cleave 10AGG-5GCC_P target are displayed in Table X. Among 57 clones, 33 clones were positives on HSV2.4, 3 of them where able to cut HSV2.6 too. Examples of positives are shown in Table XI.

TABLE X
Panel of variants extracted from our data bank

| Amino acids positions and residues | |
|---|---|
| of the I-CreI variants | SEQ ID NO: |
| 28E33R38R40K44K70D75N/ | 93 |
| 28E33R38R40K44K70E75N/ | 94 |
| 28E33R38R40K44K68T70G75N/ | 95 |
| 28E33R38R40K44K68T70S75N/ | 96 |
| 28E38R40K44K68S70S75N/ | 97 |
| 30D33A38H44K70D75N/ | 98 |
| 30D33A38H44K70E75N/ | 99 |
| D33H38K44K70D75N/ | 100 |
| 30D33H38K44K70D75N/87L | 101 |
| 30D33H38K44K70E75N/ | 102 |
| 30D33H38K44K70T75N/ | 103 |
| 30D33R38G44K70D75N/ | 104 |
| 30D33R38G44K70D75N/17A | 105 |
| 30D33R38G44K70E75N/ | 106 |
| 30G38G44K70E75N/ | 107 |
| 30G38G44K70S75N/54I | 108 |
| 30G38H44K68A70G75N/ | 109 |
| 30G38H44K68A70Q75N/ | 110 |
| 30G38H44K68A70S75N/ | 111 |
| 28k30G38H44K68G70A75N/ | 112 |
| 28k30G38H44K68N70A75N/ | 113 |
| 30G38H44K68Q70S75N/ | 114 |
| 30G38H44K70D75N/ | 115 |
| 30G38H44K70E75N/ | 116 |
| 30G38H44K70N75N/ | 117 |
| 30G38H44K70S75N/ | 118 |
| 30G38H44K68S70D75N/ | 119 |
| 30G38H44K68T70S75N/ | 120 |
| 30G38R44K68A70G75N/ | 121 |
| 30G38R44K68A70N75N/ | 122 |
| 30G38R44K68A70Q75N/ | 123 |
| 30G38R44K68G70S75N/ | 124 |
| 30G38R44K68G70S75N/3A | 125 |
| 30G38R44K68H70S75N/ | 126 |
| 30G38R44K68Q70D75N/ | 127 |
| 30G38R44K68Q70S75N/ | 128 |
| 30G38R44K70D75N/ | 129 |
| 30G38R44K70E75N/ | 130 |
| 30G38R44K70N75N/ | 131 |

TABLE XI
I-CreI variants capable of cleaving the HSV2.4
and/or HSV2.6 DNA targets.

| Amino acids positions and residues | |
|---|---|
| of the I-CreI variants | SEQ ID NO: |
| 28E38R40K44K70E75N/54L81V96R153V160R | 132 |
| 28E38R40K44K68S70S75N/94S132V150T | 133 |
| 30G38G44K70S75N/54I | 134 |
| 28E38R40K44K70E75N/163T | 135 |
| 28E38R40K44K70E75N/ | 136 |
| 28E38R40K44K68S70S75N/ | 137 |
| 30G38H44K70S75N/ | 138 |
| 28E38R40K44K70E75N77T/ | 139 |
| 30G38R44K70S75N/162F | 140 |
| 30G38R44K70D75N/ | 141 |
| 30G38R44K68S70S75N/ | 142 |
| 30G38R44K70S75N/ | 143 |
| 30G38R44K68T70S75N/ | 144 |
| 30G38R44K70S75N/62V | 145 |
| 30G38R44K68Q70S75N/ | 146 |
| 30G38H44K70D75N/ | 147 |
| 30G38R44K70E75N/ | 148 |
| 30G38R44K68T70G75N/ | 149 |
| 30G338R44K68G70S75N/3A | 150 |
| 30G38R44K70N75N/ | 151 |

### EXAMPLE 1.3

### Identification of Meganucleases Cleaving HSV2

[0383] I-CreI variants able to cleave each of the palindromic HSV2 derived targets (HSV2.3/2.5 and HSV2.4/2.6) were identified in Example 1.1 and 1.2. Pairs of such variants (one cutting HSV2.3 and one cutting HSV2.4) were co-expressed in yeast. Upon co-expression, there should be three active molecular species, two homodimers, and one heterodimer. It was assayed whether the heterodimers that should be formed, cut the non palindromic HSV2 target.

### A) Materials and Methods

### a) Construction of Target Vector

[0384] The experimental procedure is as described in Example 1.2, with the exception that an oligonucleotide corresponding to the HSV2 target sequence: 5′ TGGCATACAAGTTTATAAACTCACACACGGCGTCCTGGCAATCGTCTGTCA 3′ (SEQ ID NO: 152) was used.

### b) Co-Expression of Variants

[0385] Yeast DNA was extracted from variants cleaving the HSV2.4 target in the pCLS1107 (FIG. 6) expression vector using standard protocols and was used to transform E. coli. The resulting plasmid DNA was then used to transform yeast strains expressing a variant cutting the HSV2.3 target in the pCLS542 expression vector. Transformants were selected on synthetic medium lacking leucine and containing G418.

### c) Mating of Meganucleases Coexpressing Clones and Screening in Yeast

[0386] Mating was performed using a colony gridder (QpixII, Genetix). Variants were gridded on nylon filters covering YPD plates, using a low gridding density (4-6 spots/cm²). A second gridding process was performed on the same filters to spot a second layer consisting of different reporter-harboring yeast strains for each target. Membranes were placed on solid agar YPD rich medium, and incubated at 30° C. for one night, to allow mating. Next, filters were transferred to synthetic medium, lacking leucine and tryptophan, adding G418, with galactose (2%) as a carbon source, and incubated for five days at 37° C., to select for diploids carrying the expression and target vectors. After 5 days, filters were placed on solid agarose medium with 0.02% X-Gal in 0.5 M sodium phosphate buffer, pH 7.0, 0.1% SDS, 6% dimethyl formamide (DMF), 7 mM β-mercaptoethanol, 1% agarose, and incubated at 37° C., to monitor β-galactosidase activity. Results were analyzed by scanning and quantification was performed using appropriate software.

### B) Results

[0387] Co-expression of variants cleaving the HSV2.4 target (6 variants chosen among those described in Table XI) and 10 variants cleaving the HSV2.3 target (described in Table IX) resulted in cleavage of the HSV2 target in 14 cases (FIG. 7). Functional combinations are summarized in Table XII.

TABLE XII
Cleavage of the HSV2 target by the heterodimeric variants

| | | Amino acids positions and residues | | | | |
|---|---|---|---|---|---|---|
| | | of the I-CreI variants cleaving the HSV2.3 target | | | | |
| | | 44A68Y70S7 | 44N70S7 | 44N70S7 | 44A70S7 | 44T68T7 |
| | | 5R | 5R77N | 5R77Y | 5R77Y | 0S75K77 |
| | | (SEQ ID NO: | (SEQ ID | (SEQ ID | (SEQ ID | E (SEQ ID |
| | | 159) | NO: 160) | NO: 161) | NO: 162) | NO: 163) |
| Amino acids | 28E38R40K | | | + | + | + |
| positions and | 44K68S70S7 | | | | | |
| resdidues of I-CreI | 5N/945132 | | | | | |
| variants cleaving | V150T (SEQ | | | | | |
| the HSV2.4 target | ID NO: 153) | | | | | |
| | 28E38R40K | + | | | | |
| | 44K70E75N/ | | | | | |
| | (SEQ ID | | | | | |
| | NO: 154) | | | | | |
| | 28E38R40K | | | | | + |
| | 44K70E75N/ | | | | | |
| | 77T (SEQ | | | | | |
| | ID NO: 155) | | | | | |
| | 28E38R40K | | | | | |
| | 44K70E75N/ | | | | | |
| | 163T (SEQ | | | | | |
| | ID NO: 156) | | | | | |
| | 30G38G44K | + | | | | |
| | 70S75N/54I | | | | | |
| | (SEQ ID NO: | | | | | |
| | 157) | | | | | |
| | 28E38R40K | | + | + | + | + |
| | 44K68S70S7 | | | | | |
| | 5N7 (SEQ ID | | | | | |
| | NO: 158) | | | | | |

| | | Amino acids positions and residues | | | | |
|---|---|---|---|---|---|---|
| | | of the I-CreI variants cleaving the HSV2.3 target | | | | |
| | | 44N68 | | | | |
| | | Y70S75 | | | | |
| | | R77Y | 44N68Y7 | 24V44T68 | | |
| | | (SEQ ID | 0S75R | T70S75K7 | 44R68T | 44R68A |
| | | NO: | (SEQ ID | 7E (SEQ ID | (SEQ ID | (SEQ ID |
| | | 164) | NO: 165) | NO: 166) | NO: 167) | NO: 168) |
| Amino acids | 28E38R40K | + | | | | |
| positions and | 44K68S70S7 | | | | | |
| resdidues of I-CreI | 5N/945132 | | | | | |
| variants cleaving | V150T (SEQ | | | | | |
| the HSV2.4 target | ID NO: 153) | | | | | |
| | 28E38R40K | | | + | | |
| | 44K70E75N/ | | | | | |
| | (SEQ ID | | | | | |
| | NO: 154) | | | | | |
| | 28E38R40K | | | | | + |
| | 44K70E75N/ | | | | | |
| | 77T (SEQ | | | | | |
| | ID NO: 155) | | | | | |
| | 28E38R40K | | | | | |
| | 44K70E75N/ | | | | | |
| | 163T (SEQ | | | | | |
| | ID NO: 156) | | | | | |
| | 30G38G44K | | | | | |
| | 70S75N/54I | | | | | |
| | (SEQ ID NO: | | | | | |
| | 157) | | | | | |
| | 28E38R40K | + | | | | |
| | 44K68S70S7 | | | | | |
| | 5N7 (SEQ ID | | | | | |
| | NO: 158) | | | | | |

+ indicates a functional combination

### EXAMPLE 1.4

### Improvement of Meganucleases Cleaving HSV2.5 by Random Mutagenesis

[0388] I-CreI variants able to cleave the palindromic HSV2.5 target have been previously identified in Example 1.1. Some of them can cleave the HSV2 target when associated with variants able to cut HSV2.6 (Examples 1.2 and 1.3).

[0389] Therefore 6 selected variants cleaving HSV2.5 were mutagenized, and variants were screened for activity improvement on HSV2.5. According to the structure of the I-CreI protein bound to its target, there is no contact between the 4 central base pairs (positions −2 to 2) and the I-CreI protein (Chevalier et al., Nat. Struct. Biol., 2001, 8, 312-316; Chevalier and Stoddard, Nucleic Acids Res., 2001, 29, 3757-3774; Chevalier et al., J. Mol. Biol., 2003, 329, 253-269). Thus, it is difficult to rationally choose a set of positions to mutagenize, and mutagenesis was performed on the whole protein. Random mutagenesis results in high complexity libraries. Therefore, to limit the complexity of the variant libraries to be tested, the two components of the heterodimers cleaving HSV2 were mutagenized and screened in parallel.

### A) Material and Methods

### a) Construction of Libraries by Random Mutagenesis

[0390] Random mutagenesis was performed on a pool of chosen variants, by PCR using Mn²⁺. PCR reactions were carried out that amplify the I-CreI coding sequence using the primers preATGCreF or (5′-gcataaattactatacttctatagacacgcaaacacaaatacacageggccttgccacc-3′; SEQ ID NO: 169) and ICreIpostRev (5′-ggctcgaggagctcgtctagaggatcgctcgagttatcagtcggccgc-3′; SEQ ID NO: 170), which are common to the pCLS0542 (FIG. 5) and pCLS1107 (FIG. 6) vectors. Approximately 25 ng of the PCR product and 75 ng of vector DNA (pCLS0542) linearized by digestion with NcoI and EagI were used to transform the yeast Saccharomyces cerevisiae strain FYC2-6A (MATα, trp1Δ63, leu2Δ1, his3Δ200) using a high efficiency LiAc transformation protocol (Gietz and Woods, Methods Enzymol., 2002, 350, 87-96). Expression plasmids containing an intact coding sequence for the I-CreI variant were generated by in vivo homologous recombination in yeast.

### b) Target Vector Yeast Strains

[0391] The yeast strain FYBL2-7B (MATα, ura3Δ851, trp1Δ63, leu2Δ1, lys2Δ202) containing the HSV2.5 target in the yeast reporter vector (pCLS1055 FIG. 4) was constructed as described in Example 1.1.

### c) Mating of Meganuclease Expressing Clones, Screening in Yeast and Sequencing

[0392] Mating HSV2.3 target strain and mutagenized variant clones and screening were performed as described in Example 1.1. One variant from first generation was added as control on filter during screening steps for activity improvement evaluation.

### B) Results

[0393] Six variants cleaving HSV2.5, (Table XIII), were pooled, randomly mutagenized and transformed into yeast. 2304 transformed clones were then mated with a yeast strain that contains the HSV2.5 target in a reporter plasmid. After mating with this yeast strain, 761 clones were found to cleave the HSV2.5 target. 93 of them were characterized. 72 of them shown high activity and retain HSV2.5/2.3 specificity. An Example of positives is shown in FIG. 8. Sequencing of these 46 positive clones indicates that 32 distinct variants listed in Table XIV were identified.

TABLE XIII
pool of variants cleaving HSV2.3/2.5 and sequences
used as template for random mutagenesis

| Amino acids positions and residues | |
|---|---|
| of the I-CreI variants | SEQ ID NO: |
| 44A68Y70S75R/ | 171 |
| 44N70S75R77N/ | 172 |
| 44N70S75R77Y/ | 173 |
| 44A70S75R77Y/ | 174 |
| 44T68T70S75K77E/ | 175 |
| 44N68Y70S75R77Y/ | 176 |

TABLE XIV
Improved variants displaying strong cleavage activity for HSV2.5

| Amino acids positions and residues | |
|---|---|
| of the I-CreI variants | SEQ ID NO: |
| 44A70S75R77Y/ | 177 |
| 44D68T70S75R77H/ | 178 |
| 44D68T70S75R77P/37Y | 179 |
| 44D68T70S75R77R/ | 180 |
| 44D68T70S75R77R/100R | 181 |
| 44D68T70S75R77R/12H | 182 |
| 44D68T70S75R77R/156G | 183 |
| 44D68T70S75R77R/2D37Y129A | 184 |
| 44D68T70S75R77R/37C105A | 185 |
| 44D68T70S75R77R/37Y | 186 |
| 44D68T70S75R77R/37Y114T | 187 |
| 44D68T70S75R77R/37Y121R | 188 |
| 44D68T70S75R77R/37Y129A | 189 |
| 44D68T70S75R77R/37Y66H | 190 |
| 44D68T70S75R77R/37Y82R | 191 |
| 44D68T70S75R77R/4R151A | 192 |
| 44D68T70S75R77R/4R37Y151A | 193 |
| 44D68T70S75R77R/57E159R | 194 |
| 44D68T70S75R77R/64A | 195 |
| 44D68T70S75R77R/6S37Y | 196 |
| 44D68T70S75R77R/80K | 197 |
| 44H68T70P75R77R/ | 198 |
| 44N70S75R77Y/ | 199 |
| 44N70S75R77Y/157G | 200 |
| 44N68Y70S75R/ | 201 |
| 44N68Y70S75R/132V | 202 |
| 44N68Y70S75R77Y/ | 203 |
| 44R68A75d/54S | 204 |
| 44R68T/111R | 205 |
| 44R68T/54L121E | 206 |
| 44T68T70S75R77Q/ | 207 |
| 24V44D68T70S75R77R/ | 208 |

### EXAMPLE 1.5

### Improvement of Meganucleases Cleaving HSV2.6 by Random Mutagenesis

[0394] I-CreI variants able to cleave the palindromic HSV2.4 target has been previously identified in Example 1.2. Some of them can cleave HSV4 target when associated with variants able to cut HSV2.3 (Examples 1.1 and 1.3).

[0395] Six of the selected variants cleaving HSV2.6 and 2.4 were mutagenized, and variants were screened for activity improvement on HSV2.6. As described in Example 1.4, mutagenesis was performed on the whole protein and HSV2.4 variants were screened in parallel to HSV2.3 (Example 1.4).

### A) Material and Methods

### a) Construction of Libraries by Random Mutagenesis

[0396] Random mutagenesis was performed as described in Example 1.4, on a pool of chosen variants, by PCR using the same primers and Mn²⁺ conditions (preATGCreFor SEQ ID NO: 169 and ICreIpostRev SEQ ID NO: 170). Approximately 25 ng of the PCR product and 75 ng of vector DNA pCLS1107) linearized by digestion with NcoI and EagI were used to transform the yeast Saccharomyces cerevisiae strain FYC2-6A (MATα, trp1Δ63, leu2Δ1, his3Δ200) using a high efficiency LiAc transformation protocol (Gietz and Woods, Methods Enzymol., 2002, 350, 87-96). Expression plasmids containing an intact coding sequence for the I-CreI variant were generated by in vivo homologous recombination in yeast.

### b) Target Vector Yeast Strains

[0397] The yeast strain FYBL2-7B (MATα, ura3Δ851, trp1Δ63, leu2Δ1, lys2Δ202) containing the HSV2.6 target in the yeast reporter vector (pCLS1055 FIG. 4) was constructed as described in Example 1.2.

### c) Mating of Meganuclease Expressing Clones, Screening in Yeast and Sequencing

[0398] Mating HSV2.6 target strain and mutagenized variant clones and screening were performed as described in Example 1.2. One variant from first generation was added as control on filter during screening steps for activity improvement evaluation.

### B) Results

[0399] Six chosen variants cleaving HSV2.6 and 2.4, (Table XV), were pooled, randomly mutagenized and transformed into yeast. 2304 transformed clones were then mated with a yeast strain that contains the HSV4.4 target in a reporter plasmid. After mating with this yeast strain, 32 clones were found to cleave the HSV2.6 target. An Example of positives is shown in FIG. 9. Sequencing 32 positive clones indicates that 19 distinct variants listed in Table XVI were identified.

TABLE XV
pool of variants cleaving HSV2.6 and 2.4 and
sequences used as template for random mutagenesis

| | Amino acids positions and residues |
|---|---|
| SEQ ID NO: | of the I-CreI variants |
| 209 | 28E38R40K44K68S70S75N/94S132V150T |
| 210 | 28E38R40K44K70E75N/ |
| 211 | 28E38R40K44K70E75N/77T |
| 212 | 28E38R40K44K70E75N/163T |
| 213 | 30G38G44K70S75N/54I |
| 214 | 28E38R40K44K68S70S75N/ |

TABLE XVI
Improved variants displaying cleavage activity for HSV2.6

| | Amino acids positions and residues |
|---|---|
| SEQ ID NO: | of the I-CreI variants |
| 215 | 28E38R40K44K70E75N |
| 216 | 28E38R40K44K70E75N77T/50R |
| 217 | 28E38R40K44K70E75N77T/80K |
| 218 | 28E38R40K44K70E75N77T132V150T/17A |
| 219 | 28E38R40K44K70G75N132V150T/ |
| 220 | 28E38R40K44K68S70S75N/50R |
| 221 | 28E38R40K44K68S70S75N132V |
| 222 | 28E38R40K44K68S70S75N132V163T/2D |
| 223 | 28E38R40K44K68S70S75N132V150T |
| 224 | 28E38R40K44K68S70S75N94S132V |
| 225 | 28E38R40K44K68S70S75N94S132V150T |
| 226 | 28E38R40K44K68S70S75N94S132V150T/50R |
| 227 | 28E38R40K44K68S70S75N94S132V150T/66H |
| 228 | 28E38R40K44K68S70S75N77T132V |
| 229 | 28E38R40K44K70E75N77T94S |
| 230 | 28E38R40K44K70S75N |
| 231 | 28E38R40K44K70S75N150T |
| 232 | 28E38R40K44K54L70E75N94S |
| 233 | 28E38R40K44K54L70E75N77T |

### EXAMPLE 1.6

### Identification of Improved Meganucleases Cleaving HSV2

[0400] Improved I-CreI variants able to cleave each of the palindromic

[0401] HSV2 derived targets (HSV2.3/2.5 and HSV2.4/2.6) were identified in Example 1.4 and Example 1.5. As described in Example 1.3, pairs of such variants (one cutting HSV2.3/2.5 and one cutting HSV2.4/2.6) were co-expressed in yeast. The heterodimers that should be formed were assayed for cutting the non palindromic HSV2 target.

### A) Materials and Methods

### a) Construction of Target Vector

[0402] The HSV2 target vector was constructed as described in Example 1.3.

### b) Co-Expression of Variants

[0403] Yeast DNA was extracted from variants cleaving the HSV2.6 target in the pCLS1107 expression vector using standard protocols and was used to transform E. coli. The resulting plasmid DNA was then used to transform yeast strains expressing a variant cutting the HSV2.5 target in the pCLS542 expression vector. Transformants were selected on synthetic medium lacking leucine and containing G418.

### c) Mating of Meganucleases Coexpressing Clones and Screening in Yeast

[0404] Mating and screening of meganucleases coexpressing clones were performed as described in Example 1.3. Results were analyzed by scanning and quantification was performed using appropriate software.

### B) Results

[0405] Co-expression of improved variants cleaving the HSV2.6 target (6 variants chosen among those described in Table XIV) and 7 improved variants cleaving the HSV2.5 target (described in Table XVI) resulted in cleavage of the HSV2 target in all except one case (FIG. 10). All assayed combinations are summarized in Table XVII.

TABLE XVII
Cleavage of the HSV2 target by the heterodimeric improved variants

| | | Amino acids positions and residues | | | | | | |
|---|---|---|---|---|---|---|---|---|
| | | of the I-CreI variants cleaving the HSV2.3 target | | | | | | |
| | | | 44D68T70S75 | | 44D68T70S | 44D68T70S | 44D68T70S75 | 44D68T70S75 |
| | | 44D68T70S75R | R77R/12H | 44R68T/54L1 | 75R77R | 75R77R/15 | R77R/100R | R77R/64A |
| | | 77R/80K (SEQ | (SEQ ID NO: | 21E (SEQ ID | (SEQ ID | 6G (SEQ ID | (SEQ ID NO: | (SEQ ID NO: |
| | | ID NO: 240) | 241) | NO: 242) | NO: 243) | NO: 244) | 245) | 246) |
| Amino acids | 28E38R40K44K6 | + | + | + | | + | + | + |
| positions and | 8S70S75N132V1 | | | | | | | |
| residues of | 50T (SEQ ID NO: | | | | | | | |
| I-CreI | 234) | | | | | | | |
| variants | 28E38R40K44K5 | + | + | + | + | + | + | + |
| cleaving the | 4L70E75N77T | | | | | | | |
| HSV2.4 | (SEQ ID NO: 235) | | | | | | | |
| target | 28E30n38R40K4 | + | + | + | + | + | + | + |
| | 4K54I68r70S75N | | | | | | | |
| | 77i94f132i150a1 | | | | | | | |
| | 63p (SEQ ID NO: | | | | | | | |
| | 236) | | | | | | | |
| | 28E38R40K44K6 | + | + | + | + | + | + | + |
| | 8S70S75N/50R | | | | | | | |
| | (SEQ ID NO: 237) | | | | | | | |
| | 28E38R40K44K7 | + | + | + | + | + | + | + |
| | 0E75N77T132V1 | | | | | | | |
| | 50T/17A (SEQ ID | | | | | | | |
| | NO: 238) | | | | | | | |
| | 28E38R40K44K7 | + | + | + | + | + | + | + |
| | 0E75N77T94S | | | | | | | |
| | (SEQ ID NO: 239) | | | | | | | |

+ indicates a functional combination

### EXAMPLE 1.7

### Validation of HSV2 Target Cleavage in an Extrachromosomal Model in CHO Cells

[0406] I-CreI variants able to efficiently cleave the HSV2 target in yeast when forming heterodimers were described in Examples 1.3 and 1.7. In order to identify heterodimers displaying maximal cleavage activity for the HSV2 target in CHO cells, the efficiency of chosen combinations of variants to cut the HSV2 target was compared, using an extrachromosomal assay in CHO cells. The screen in CHO cells is a single-strand annealing (SSA) based assay where cleavage of the target by the meganucleases induces homologous recombination and expression of a LagoZ reporter gene (a derivative of the bacterial lacZ gene).

1) Materials and methods

### a) Cloning of HSV2 Target in a Vector for CHO Screen

[0407] The target was cloned as follows: oligonucleotide corresponding to the HSV2 target sequence flanked by gateway cloning sequence was ordered from PROLIGO 5′TGGCATACAAGTTTATAAACTCACACACGGCGTCCTGGCAATCGTCTGT CA3′ (SEQ ID NO: 152). Double-stranded target DNA, generated by PCR amplification of the single stranded oligonucleotide, was cloned using the Gateway protocol (INVITROGEN) into CHO reporter vector (pCLS1058, FIG. 11). Cloned target was verified by sequencing (MILLEGEN).

### b) Re-Cloning of Meganucleases

[0408] The ORF of I-CreI variants cleaving the HSV2.3 and HSV2.4 targets identified in Examples 1.4 and 1.5 were sub-cloned in pCLS2437 (FIG. 12). ORFs were amplified by PCR on yeast DNA using the AT1CA1F (5′-AAAAAGCAGGCTGGCGCGCCTACACAGCGGCCTTGCCACCATG-3′ SEQ ID NO: 247) and AT2CA2R (5% AGAAAGCTGGGTGCTAGCGCTCGAGTTATCAGTCGG-3′ SEQ ID NO: 248) primers. PCR products were cloned in the CHO expression vector pCLS2437 (FIG. 12) using the Asc I and Xho I for internal fragment replacement. Selected clones resulting from ligation and E. coli transformation steps were verified by sequencing (MILLEGEN).

### c) Extrachromosomal Assay in Mammalian Cells

[0409] CHO K1 cells were transfected with Polyfect® transfection reagent according to the supplier's protocol (QIAGEN). 72 hours after transfection, culture medium was removed and 150 W of lysis/revelation buffer for β-galactosidase liquid assay was added (typically 1 liter of buffer contained: 100 ml of lysis buffer (Tris-HC₁₋₁₀ mM pH7.5, NaCl 150 mM, Triton X100 0.1%, BSA 0.1 mg/ml, protease inhibitors), 10 ml of Mg 100× buffer (MgCl₂ 100 mM, β-mercaptoethanol 35%), 110 ml ONPG 8 mg/ml and 780 ml of sodium phosphate 0.1M pH7.5). After incubation at 37° C., OD was measured at 420 nm. The entire process is performed on an automated Velocity 11 BioCel platform.

[0410] Per assay, 150 ng of target vector was cotransfected with 12.5 ng of each one of both mutants (12.5 ng of mutant cleaving palindromic HSV2.3 target and 12.5 ng of mutant cleaving palindromic HSV2.4 target).

### 2) Results

[0411] 2 variants cleaving HSV2.5 and 2 variants cleaving HSV2.6 described in Example 1.4, 1.5 and 1.6 were re-cloned in pCLS2437 (FIG. 12). Then, I-CreI variants cleaving the HSV2.5 or HSV2.6 targets were assayed together as heterodimers against the HSV2 target in the CHO extrachromosomal assay.

[0412] Table XVIII shows the functional combinations obtained for 4 heterodimers. Analysis of the efficiencies of cleavage and recombination of the HSV2 sequence demonstrates that 4 combinations of I-CreI variants are able to transpose their cleavage activity from yeast to CHO cells without additional mutation.

TABLE XVIII
Functional heterodimeric combinations cutting the HSV2 target in
CHO cells.

| | | Optimized variants cleaving | |
|---|---|---|---|
| | | HSV2.5 | |
| | | 44D68T70S75 | |
| | | R77R/80K | 44D68T70S75R77 |
| | | (SEQ ID NO: | R/(SEQ ID NO: |
| | | 251) | 252) |
| Optimized variants | 28E38R40K44K70S7 | + | + |
| cleaving HSV2.6 | 5N (SEQ ID NO: 249) | | |
| | 28E38R40K44K70E7 | + | + |
| | 5N77T132V150T/17 | | |
| | A (SEQ ID NO: 250) | | |

+ indicates a functional combination

### EXAMPLE 1.8

### Covalent Assembly as Single Chain and Improvement of Meganucleases Cleaving HSV2 by Site-Directed Mutagenesis

[0413] Co-expression of the cutters described in Example 1.5, 1.6, 1.7 leads to a high cleavage activity of the HSV2 target in yeast. Some of them have been validated for HSV2 cleavage in a mammalian expression system. One of them is shown in Table XIX.

TABLE XIX
Example of functional heterodimer cutting the HSV2 target in CHO
cells.

| | |
|---|---|
| HSV2.3-M1 (SEQ ID NO: 33) | 44D 68T 70S 75R 77R 80K |
| HSV2.4-MC (SEQ ID NO: 34) | 28E 38R 40K 44K 54I 70S 75N |

[0414] The M1×MC HSV2 heterodimer gives high cleavage activity in yeast. M1 is a HSV2.5 cutter that bears the following mutations in comparison with the I-CreI wild type sequence: 44D 68T 70S 75R 77R 80K. MC is a HSV2.6 cutter that bears the following mutations in comparison with the I-CreI wild type sequence: 28E 38R 40K 44K 54I 70S 75N.

[0415] Single chain constructs were engineered using the linker RM2 (AAGGSDKYNQALSKYNQALSKYNQALSGGGGS) (SEQ ID NO: 464) resulting in the production of the single chain molecule: M1-RM2-MC. During this design step, the 0195 mutation was introduced in the C-terminal MC mutant. In addition, mutations K7E, K96E were introduced into the M1 mutant and mutations ESK, E61R into the MC mutant to create the single chain molecule: M1 (K7E K96E)-RM2-MC(E8K E61R) that is called further SCOH-HSV2-M1-MC.

[0416] Four additional amino-acid substitutions have been found in previous studies to enhance the activity of I-CreI derivatives: these mutations correspond to the replacement of Phenylalanine 54 with Leucine (F54L), Glutamic acid 80 with Lysine (E80K), Valine 105 with Alanine (V105A) and Isoleucine 132 with Valine (I132V). Only E80K is already present in HSV2.5 variant (i.e. HSV2.5-M1). Some additional combinations were introduced into the coding sequence of N-terminal and C-terminal protein fragment (an Example is shown in Table XX), and the resulting proteins were tested for their ability to induce cleavage of the HSV2 target. The twelve single chain constructs were then tested in CHO for cleavage of the HSV2 target.

TABLE XX
Single Chain I-Cre I variants for HSV2 cleavage in CHO cells.

| | | Mutations on | Mutations on | |
|---|---|---|---|---|
| | | N-terminal | C-terminal | SEQ ID |
| Construct | Single chain | segment | segment | NO |
| pCLS2456 | SCOH-HSV2- | 7E 44D 68T | 8K 19S 28E | 253 |
| | M1-MC | 70S 75R 77R | 38R 40K 44K | |
| | | 80K 96E | 54I 61R 70S | |
| | | | 75N | |
| pCLS2457 | SCOH-HSV2- | 7E 44D 68T | 8K 19S 28E | 254 |
| | M1-MC-132V | 70S 75R 77R | 38R 40K 44K | |
| | | 80K 96E | 54I 61R 70S | |
| | | | 75N 132V | |
| pCLS2458 | SCOH-HSV2- | 7E 44D 68T | 8K 19S 28E | 255 |
| | M1-MC- | 70S 75R 77R | 38R 40K 44K | |
| | 80K132V | 80K 96E | 54I 61R 70S | |
| | | | 75N 80K | |
| | | | 132V | |
| pCLS2459 | SCOH-HSV2- | 7E 44D 68T | 8K 19S 28E | 256 |
| | M1-MC- | 70S 75R 77R | 38R 40K 44K | |
| | 80K105A132V | 80K 96E | 54I 61R 70S | |
| | | | 75N 80K | |
| | | | 105A 132V | |
| pCLS2460 | SCOH-HSV2- | 7E 44D 68T | 8K 19S 28E | 257 |
| | M1-132V-MC | 70S 75R 77R | 38R 40K 44K | |
| | | 80K 96E 132V | 54I 61R 70S | |
| | | | 75N | |
| pCLS2462 | SCOH-HSV2- | 7E 44D 68T | 8K 19S 28E | 258 |
| | M1-132V- | 70S 75R 77R | 38R 40K 44K | |
| | MC-80K105A | 80K 96E 132V | 54I 61R 70S | |
| | | | 75N 80K | |
| | | | 105A | |
| pCLS2463 | SCOH-HSV2- | 7E 44D 68T | 8K 19S 28E | 259 |
| | M1-132V- | 70S 75R 77R | 38R 40K 44K | |
| | MC-80K132V | 80K 96E 132V | 54I 61R 70S | |
| | | | 75N 80K | |
| | | | 132V | |
| pCLS2464 | SCOH-HSV2- | 7E 44D 68T | 8K 19S 28E | 260 |
| | M1-132V- | 70S 75R 77R | 38R 40K 44K | |
| | MC- | 80K 96E 132V | 54I 61R 70S | |
| | 80K105A132V | | 75N 80K | |
| | | | 105A 132V | |
| pCLS2465 | SCOH-HSV2- | 7E 44D 68T | 8K 19S 28E | 261 |
| | M1- | 70S 75R 77R | 38R 40K 44K | |
| | 105A132V- | 80K 96E 105A | 54I 61R 70S | |
| | MC-132V | 132V | 75N 132V | |
| pCLS4381 | SCOH-HSV2- | 7E 44D 68T | 8K 19S 28E | 532 |
| | M1-MC- | 77R 80K 96E | 38R 40K 44K | |
| | 80K105A132 | | 54I 61R 80K | |
| | VRev1 | | 105A 132V | |
| pCLS4382 | SCOH-HSV2- | 7E 44D 68T | 8K 19S 28E | 533 |
| | M1-MC- | 77R 80K 96E | 38R 40K 44K | |
| | 80K105A132 | | 54I 61R 70S | |
| | VRev1 | | 80K 105A | |
| | | | 132V | |

### 1) Material and Methods

### a) Cloning of the SC_OH Single Chain Molecule

[0417] A series of synthetic gene assembly was ordered to MWG-EUROFINS. Synthetic genes coding for the different single chain variants targeting HSV2 were cloned in pCLS1853 (FIG. 14) using AscI and XhoI restriction sites.

### b) Extrachromosomal Assay in Mammalian Cells

[0418] CHO K1 cells were transfected as described in Example 1.8. 72 hours after transfection, culture medium was removed and 150 μl of lysis/revelation buffer for β-galactosidase liquid assay was added. After incubation at 37° C., OD was measured at 420 nm. The entire process is performed on an automated Velocity11 BioCel platform.

[0419] Per assay, 150 ng of target vector was cotransfected with an increasing quantity of variant DNA from 0.75 to 25 ng (25 ng of single chain DNA corresponding to 12.5 ng+12.5 ng of heterodimer DNA). Finally, the transfected DNA variant DNA quantity was 0.78 ng, 1.56 ng, 3.12 ng, 6.25 ng, 12.5 ng and 25 ng. The total amount of transfected DNA was completed to 175 ng (target DNA, variant DNA, carrier DNA) using empty vector (pCLS0001).

### 2) Results

[0420] The activity of the SCOH-HSV2 single chain molecules (Table XX) against the HSV2 target was monitored using the previously described CHO assay in comparison to the HSV2.3-M1×HSV2.4-MC heterodimer (pCLS2733×pCLS2735) and our internal control SCOH-RAG and I-Sce I meganucleases. All comparisons were done at 0.78 ng, 1.56 ng, 3.12 ng, 6.25 ng, 12.5 ng, and 25 ng transfected variant DNA (FIGS. 18 and 19).

[0421] Variants shared specific behaviour upon assayed dose depending on the mutation profile they bear (FIGS. 18 and 19). For Example, SCOH-HSV2-M1-105A132V-MC-132V (pCLS2465) has a similar profile to our internal standard SCOH-RAG (SEQ ID NO: 468): its activity increases from low quantity to high quantity (FIG. 20). SCOH-HSV2-M1-MC-80K105A132V (pCLS2459) has an activity maximum at low quantity of transfected DNA (1.56 ng) and its activity quickly decreases with dose (Figableure 21). SCOH-HSV2-M1-MC-132V (pCLS2457) shares an intermediate profile between the two previous ones, it has maximum activity at a low dose (3.12 ng) which slowly decreases as the dose increases (FIG. 22). All of these variants could be used for HSV-1 genome targeting depending on the tissue infected.

### EXAMPLE 2

### Strategy for Engineering Novel Meganucleases Cleaving Targets from the ICP₀ Gene in HSV-1 Genome

[0422] HSV4 is a 24 bp (non-palindromic) target present in the RL2 gene encoding the ICP0 or a0 protein. This 3.6 kb gene repeated twice in TRL (2086 to 5698) and IRL (120673 to 124285) regions is formed of three exons: position 2261 to 2317, 3083 to 3749, 3886 to 5489 and 120882 to 122485,122622 to 123288, 124054 to 124110. The target sequence present in exon 2 corresponds to positions 3498 to 3521 and 122850 to 122873 in the two copies of the HSV-1 ICP₀ gene (accession number NC_{—}001806; FIG. 23).

[0423] The HSV4 sequence is partly a patchwork of the 10AAG_P, 5GGT_P, 5CAG_P, 10ACT_P targets (FIG. 24).

[0424] The 10AAG_P, 5GGT_P, 5CAG_P, 10ACT_P targets sequences are 24 bp derivatives of C1221, a palindromic sequence cleaved by I-CreI (Arnould et al., preened). However, the structure of I-CreI bound to its DNA target suggests that the two external base pairs of these targets (positions −12 and 12) have no impact on binding and cleavage (Chevalier et al., Nat. Struct. Biol., 2001, 8, 312-316; Chevalier and Stoddard, Nucleic Acids Res., 2001, 29, 3757-3774; Chevalier et al., J. Mol. Biol., 2003, 329, 253-269), and in this study, only positions −11 to 11 were considered. Consequently, the HSV4 series of targets were defined as 22 bp sequences instead of 24 bp. HSV4 do not differs from C1221 in the 4 bp central region. According to the structure of the I-CreI protein bound to its target, there is no contact between the 4 central base pairs (positions −2 to 2) and the I-CreI protein (Chevalier et al., Nat. Struct. Biol., 2001, 8, 312-316; Chevalier and Stoddard, Nucleic Acids Res., 2001, 29, 3757-3774; Chevalier et al., J. Mol. Biol., 2003, 329, 253-269). Thus, the bases at these positions should not impact the binding efficiency. However if different, they could have affected cleavage, which results from two nicks at the edge of this region. Thus, the sequence gtac in −2 to 2 was not modified during process.

[0425] Two palindromic targets, HSV4.3 and HSV4.4, were derived from HSV4 (FIG. 24). Since HSV4.3 and HSV4.4 are palindromic, they should be cleaved by homodimeric proteins. Thus, proteins able to cleave the HSV4.3 and HSV4.4 sequences as homodimers were first designed (Examples 2.1 and 2.2) and then co-expressed to obtain heterodimers cleaving HSV4 (Example 2.3). Heterodimers cleaving the HSV4 target could be identified. In order to improve cleavage activity for the HSV4 target, a series of variants cleaving HSV4.3 and HSV4.4 was chosen, and then refined. The chosen variants were subjected to random or site-directed mutagenesis, and used to form final heterodimers that were assayed against the HSV4 target (Examples 2.4, 2.5 and 2.6). Heterodimers could be identified with an improved cleavage activity for the HSV4 target. Chosen heterodimers were subsequently cloned into mammalian expression vectors and screened against the HSV4 target in CHO cells (Example 2.7). From positive heterodimer combinations in CHO cells, single chain variants with additional mutations were designed as final constructs for HSV4 targeting in mammalian cells. Strong cleavage activity of the HSV4 target could be observed for these heterodimers and single chain variants (Example 2.8).

### EXAMPLE 2.1

### Identification of Meganucleases Cleaving HSV4.3

[0426] This Example shows that I-CreI variants can cut the HSV4.3 DNA target sequence derived from the left part of the HSV4 target in a palindromic form. Target sequences described in this Example are 22 bp palindromic sequences. Therefore, they will be described only by the first 11 nucleotides, followed by the suffix P (For Example, target HSV4.3 will be noted HSV4.3 CAAGCTGGTGT_P SEQ ID NO: 18).

### A) Material and Methods

### a) Construction of Target Vector

[0427] The target was cloned as follows: an oligonucleotide corresponding to the HSV4.3 target sequence flanked by gateway cloning sequences was ordered from (PROLIGO): 5′TGGCATACAAGTTTCCAAGCTGGTGTACACCAGCTT GGCAATCGTCTGTCA3′ (SEQ ID NO: 262). Double-stranded target DNA, generated by PCR amplification of the single stranded oligonucleotide, was cloned using the Gateway protocol (INVITROGEN) into the yeast reporter vector (pCLS1055, FIG. 4). Yeast reporter vector was transformed into Saccharomyces cerevisiae strain FYBL2-7B (MATα, ura3Δ851, trp1Δ63, leu2Δ1, lys2Δ202), resulting in a reporter strain. (MilleGen)

### b) Construction of Combinatorial Mutants

[0428] I-CreI variants cleaving 10AAG_P or 5GGT_P were previously identified, as described in Smith et al. Nucleic Acids Res., 2006, 34, e149; International PCT Applications WO 2007/060495 and WO 2007/049156, and Arnould et al., J. Mol. Biol., 2006, 355, 443-458; International PCT Applications WO 2006/097784 and WO 2006/097853, respectively for the 10AAG_P and 5GGT_P targets. In order to generate I-CreI derived coding sequences containing mutations from both series, separate overlapping PCR reactions were carried out that amplify the 5′ end (aa positions 1-43) or the 3′ end (positions 39-167) of the I-CreI coding sequence. For both the 5′ and 3′ end, PCR amplification is carried out using primers For both the 5′ and 3′ end, PCR amplification is carried out using primers (Gal10F 5′-gcaactttagtgctgacacatacagg-3′ (SEQ ID NO: 263) or Gal10R 5′-acaaccttgattggagacttgacc-3′(SEQ ID NO: 264)) specific to the vector (pCLS0542, FIG. 5) and primers (assF 5′-ctannnttgaccttt-3′ (SEQ ID NO: 265) or assR 5′-aaaggtcaannnntag-3′(SEQ ID NO: 266)), where nnn codes for residue 40, specific to the I-CreI coding sequence for amino acids 39-43. The PCR fragments resulting from the amplification reaction realized with the same primers and with the same coding sequence for residue 40 were pooled. Then, each pool of PCR fragments resulting from the reaction with primers Gal10F and assR or assF and Gal10R was mixed in an equimolar ratio. Finally, approximately 25 ng of each final pool of the two overlapping PCR fragments and 75 ng of vector DNA (pCLS0542, FIG. 5) linearized by digestion with NcoI and EagI were used to transform the yeast Saccharomyces cerevisiae strain FYC2-6A (MATα, trp1Δ63, leu2Δ1, his3Δ200) using a high efficiency LiAc transformation protocol (Gietz and Woods, Methods Enzymol., 2002, 350, 87-96). An intact coding sequence containing both groups of mutations is generated by in vivo homologous recombination in yeast.

### c) Mating of Meganuclease Expressing Clones and Screening in Yeast

[0429] Screening was performed as described previously (Arnould et al., J. Mol. Biol., 2006, 355, 443-458). Mating was performed using a colony gridder (QpixII, GENETIX). Variants were gridded on nylon filters covering YPD plates, using a low gridding density (4-6 spots/cm²). A second gridding process was performed on the same filters to spot a second layer consisting of the reporter-harboring yeast strain. Membranes were placed on solid agar YPD rich medium, and incubated at 30° C. for one night, to allow mating. Next, filters were transferred to synthetic medium, lacking leucine and tryptophan, with galactose (2%) as a carbon source, and incubated for five days at 37° C., to select for diploids carrying the expression and target vectors. After 5 days, filters were placed on solid agarose medium with 0.02% X-Gal in 0.5 M sodium phosphate buffer, pH 7.0, 0.1% SDS, 6% dimethyl formamide (DMF), 7 mM β-mercaptoethanol, 1% agarose, and incubated at 37° C., to monitor β-galactosidase activity. Results were analyzed by scanning and quantification was performed using appropriate software.

### d) Sequencing of Variants

[0430] To recover the variant expression plasmids, yeast DNA was extracted using standard protocols and used to transform E. coli. Sequencing of variant ORFs was then performed on the plasmids by MILLEGEN SA. Alternatively, ORFs were amplified from yeast DNA by PCR (Akada et al., Biotechniques, 2000, 28, 668-670), and sequencing was performed directly on the PCR product by MILLEGEN SA.

### B) Results

[0431] I-CreI combinatorial variants were constructed by associating mutations at positions 44, 68, 70, 75 and 77 from proteins cleaving 5GGT_P with the 28, 30, 32, 33, 38 and 40 mutations from proteins cleaving 10AAG_P on the I-CreI scaffold, resulting in a library of complexity 1680. Examples of combinatorial variants are displayed in Table XXI. This library was transformed into yeast and 3348 clones (2 times the diversity) were screened for cleavage against the HSV4.3 DNA target (CCAAGCTGGTGTACACCAGCTTGG). 9 positive clones were found which after sequencing turned out to correspond to 7 different novel endonuclease variants (Table XXII). Examples of positives are shown in Table XXII. The sequences of three variants identified display non parental combinations at positions 28, 30, 32, 33, 38, 40 or 44, 68, 70, 75, 77. These variants may be I-CreI combined variants resulting from micro-recombination between two original variants during in vivo homologous recombination in yeast. Moreover, two of the selected variants display additional mutations to parental combinations (see Examples Table XXII). Such mutations likely result from PCR artifacts during the combinatorial process.

TABLE XXI
Panel of variants theoretically present in the combinatorial library

| Amino | | | | | | | | | | | |
|---|---|---|---|---|---|---|---|---|---|---|---|
| acids at | | | | | | | | | | | |
| positions | | | | | | | | | | | |
| 44, 68, | | | | | | | | | | | |
| 70, | | | | | | | | | | | |
| 75 and | | | | | | | | | | | |
| 77 | | | | | | | | | | | |
| (ex: | | | | | | | | | | | |
| ARNNI | | | | | | | | | | | |
| stands for | | | | | | | | | | | |
| A44, R68, | | | | | | | | | | | |
| N70, | Amino acids at positions 28, 30,32, 33, 38 and 40 | | | | | | | | | | |
| N75 and | (ex: KHSSQS stands for K28, H30, S32, S33, Q38 and S40) | | | | | | | | | | |
| 177) | NTSYDS | RNSAYQ | SNSYQK | KASYQS | KASHQS | KASTQS | KDSRQS | KGSYQS | KGAYQS | KGSYGS | KGSYHS |
| ASSDR | | | | | | | | | | | |
| ARHDI | | | | | | | | | | | |
| DQSYR | | | | | | | | | | | |
| DRHDI | | | | | | | | | | | |
| DRRNI | | | | | | | | | | | |
| HKKDI | | | | | | | | | | | |
| IRKNV | | | | | | | | | | | |
| KYSNV | | | | | | | | | | | |
| KSTDI | | | | | | | | | | | |
| LRKNV | | | | | | | | | | | |
| LRNNI | | | | | | | | | | | |
| MRANI | | | | | | | | | | | |
| MRCNI | | | | | | | | | | | |
| NKSHF | | | | | | | | | | | |
| TRHDI | | | | | | | | | | | |
| TRKDI | | | | | | | | | | | |
| YRSDI | | | | | | | | | | | |
| YRSAT | | | | | | | | | | | |
| YRSEI | | | | | | | | | | | |
| YRSNI | | | | | | | | | | | |
| YRSNV | | | | | | | | | | | |
| YRSYQ | | | | | | | | | | | |
| YRSYT | | | | | | | | | | | |
| QRSNL | | | | | | | | | | | |

*Only 264 out of the 1680 combinations are displayed. None of them were identified in the
positive clones.

TABLE XXII
I-CreI variants with and without additional
mutations capable of cleaving the HSV4.3 DNA
target.

| Amino acids at positions 28, 30, 32, | |
|---|---|
| 33, 38, 40/44, 68, 70, 75 and 77 | |
| of the I-CreI variants | |
| (ex: KRSRES/TYSNI stands for | SEQ |
| K28, R30, S32, R33, E38, S40/T44, | ID |
| Y68, S70, N75 and 177) | NO: |
| KNSYQS/MRANV/132V | 267 |
| KNSYQS/MRCNI/12H | 268 |
| SNSYQK/MRNNI/80K94L | 269 |
| KNSYQS/LRNNI/80K | 270 |
| KGSYQS/IRKNV/132V | 271 |
| KNSYQS/YRKDI | 272 |
| SNSYQK/LRNNI/80K | 273 |

### EXAMPLE 2.2

### Identification of Meganucleases Cleaving HSV4.4

[0432] This Example shows that I-CreI variants can cleave the HSV4.4 DNA target sequence derived from the right part of the HSV4 target in a palindromic form (FIG. 24). All target sequences described in this Example are 22 bp palindromic sequences. Therefore, they will be described only by the first 11 nucleotides, followed by the suffix _P (for Example, HSV4.4 will be called CACTATCAGGT_P).

### A) Material and Methods

### a) Construction of Target Vector

[0433] The experimental procedure is as described in Example 2.1, with the exception that an oligonucleotide corresponding to the HSV4.4 target sequence was used:

(SEQ ID NO: 274)
5′TGGCATACAAGTTTCCACTATCAGGTACCTGATAGTGGCAATCGTCTG
TCA3′.

### b) Construction of Combinatorial Variants

[0434] I-CreI variants cleaving 10ACT_P or 5CAG_P were previously identified, as described in Smith et al. Nucleic Acids Res., 2006, 34, e149; International PCT Applications WO 2007/060495 and WO 2007/049156, and Arnould et al., J. Mol. Biol., 2006, 355, 443-458; International PCT Applications WO 2006/097784 and WO 2006/097853, respectively for the 10ACT_P and 5CAG_P targets. In order to generate I-CreI derived coding sequences containing mutations from both series, separate overlapping PCR reactions were carried out that amplify the 5′ end (aa positions 1-43) or the 3′ end (positions 39-167) of the I-CreI coding sequence. For both the 5′ and 3′ end, PCR amplification is carried out using primers (Gal10F 5′-gcaactttagtgctgacacatacagg-3′ (SEQ ID NO: 263) or Gal10R 5′-acaaccttgattggagacttgacc-3′ (SEQ ID NO: 264)) specific to the vector (pCLS1107, FIG. 6) and primers (assF 5′-ctannnttgaccttt-3′ (SEQ ID NO: 265) or assR 5′-aaaggtcaannntag-3′(SEQ ID NO: 266)), where nnn codes for residue 40, specific to the I-CreI coding sequence for amino acids 39-43. The PCR fragments resulting from the amplification reaction realized with the same primers and with the same coding sequence for residue 40 were pooled. Then, each pool of PCR fragments resulting from the reaction with primers Gal10F and assR or assF and Gal10R was mixed in an equimolar ratio. Finally, approximately 25 ng of each final pool of the two overlapping PCR fragments and 75 ng of vector DNA (pCLS1107, FIG. 6) linearized by digestion with NcoI and EagI were used to transform the yeast Saccharomyces cerevisiae strain FYC2-6A (MATα, trp1Δ63, leu2Δ1, his3Δ200) using a high efficiency LiAc transformation protocol (Gietz and Woods, Methods Enzymol., 2002, 350, 87-96). An intact coding sequence containing both groups of mutations is generated by in vivo homologous recombination in yeast.

### c) Mating of Meganuclease Expressing Clones and Screening in Yeast

[0435] Screening was performed as described previously (Arnould et al., J. Mol. Biol., 2006, 355, 443-458). Mating was performed using a colony gridder (QpixII, GENETIX). Variants were gridded on nylon filters covering YPD plates, using a low gridding density (4-6 spots/cm²). A second gridding process was performed on the same filters to spot a second layer consisting of the reporter-harboring yeast strain. Membranes were placed on solid agar YPD rich medium, and incubated at 30° C. for one night, to allow mating. Next, filters were transferred to synthetic medium, lacking tryptophan, adding G418, with galactose (2%) as a carbon source, and incubated for five days at 37° C., to select for diploids carrying the expression and target vectors. After 5 days, filters were placed on solid agarose medium with 0.02% X-Gal in 0.5 M sodium phosphate buffer, pH 7.0, 0.1% SDS, 6% dimethyl formamide (DMF), 7 mM β-mercaptoethanol, 1% agarose, and incubated at 37° C., to monitor β-galactosidase activity. Results were analyzed by scanning and quantification was performed using appropriate software. Positives resulting clones were verified by sequencing (MILLEGEN) as described in Example 2.2.

### B) Results

[0436] I-CreI combinatorial variants were constructed by associating mutations at positions 44, 68, 70, 75 and 77 from proteins cleaving 5CAG_P with the 28, 30, 32, 33, 38 and 40 mutations from proteins cleaving 10ACT_P on the I-CreI scaffold, resulting in a library of complexity 1600. Examples of combinatorial variants are displayed in Table XXIII. This library was transformed into yeast and 3348 clones (2.1 times the diversity) were screened for cleavage against the HSV4.4 DNA target (CACTATCAGGT_P). A total of 20 positive clones were found to cleave HSV4.4. Sequencing and validation by secondary screening of these I-CreI variants resulted in the identification of 14 different novel endonucleases. The sequence of 4 of the variants identified display non parental combinations at positions 28, 30, 32, 33, 38, 40 or 44, 68, 70, 75, 77 as well as additional mutations (see Examples in Table XXIV). Such variants likely result from PCR artifacts during the combinatorial process. Alternatively, the variants may be I-CreI combined variants resulting from micro-recombination between two original variants during in vivo homologous recombination in yeast.

TABLE XXIII
Panel of variants theoretically present in the combinatorial library

| Amino | | | | | | | | | | |
|---|---|---|---|---|---|---|---|---|---|---|
| acids at | | | | | | | | | | |
| positions | | | | | | | | | | |
| 44, 68, | | | | | | | | | | |
| 70, | | | | | | | | | | |
| 75 and | | | | | | | | | | |
| 77 | | | | | | | | | | |
| (ex: | | | | | | | | | | |
| HNRDI | | | | | | | | | | |
| stands for | | | | | | | | | | |
| H44, N68, | | | | | | | | | | |
| R70, | Amino acids at positions 28, 30, 32, 33, 38 and 40 | | | | | | | | | |
| D75 and | (ex: KRGYQS stands for K28, R30, G32, Y33, Q38 and S40) | | | | | | | | | |
| I77) | KASTQS | KCSCQS | KGSYGS | KHSSQS | KKSAQS | KKSHQS | KKSRQS | KKSSQS | KKSTQS | KNDYYS |
| ARGNI | | | | | | | | | | |
| ARSNI | | | | | | | | | | |
| ATNNI | | | | | | | | | | |
| ANNNI | | | | | | | | | | |
| NRNNI | | | | | | | | | | |
| ARNNI | | | | | | | | | | |
| AQRNI | | | | | | | | | | |
| ARHNI | | | | | | | | | | |
| QGGNI | | | | | | | | | | |
| AASYK | | | | | | | | | | |
| ARSYT | | | | | | | | | | |
| RYSEV | | | | | | | | | | |
| DHSYI | | | | | | | | | | |
| RYSDT | | | | | | | | | | |
| ASSYK | | | | | | | | | | |
| SYSYV | | | | | | | | | | |
| NHSYN | | | | | | | | | | |
| ATSDR | | | | | | | | | | |
| AYSYI | | | | | | | | | | |
| RYSYV | | | | | | | | | | |
| ARSDR | | | | | | | | | | |
| RYSYN | | | | | | | | | | |

* Only 220 out of the 1600 combinations are displayed.
+ indicates that a functional combinatorial variant cleaving the HSV4.4 target was found among the identified positives.

TABLE XXIV
I-CreI variants with and without additional
mutations capable of cleaving the HSV4.4 DNA
target.

| Amino acids at positions 28, 30, 32, | |
|---|---|
| 33, 38, 40/44, 68, 70, 75 and 77 | |
| of the I-CreI variants | SEQ |
| (ex: KRGYQS/KYSNI stands for K28, R30, G32 , | ID |
| Y33, Q38, S40/K44, Y68, S70, N75 and I77) | NO: |
| KNSRES/NHSYN/80K | 275 |
| KNTYSS/TYSYV/80K | 276 |
| KNTYWS/ARSYY | 277 |
| KNTCQS/AYSYK | 278 |
| KNTYSS/AYSYK | 279 |
| KRDYQS/ACSYI/115V | 280 |
| KRSYES/AYSYK | 281 |
| KNEYYS/NYSYK | 282 |
| KNAYYS/AYSYK | 283 |
| KRDYQS/AYSYK | 284 |
| KNEYYS/AYSYK | 285 |
| KNSRES/AYSYK | 286 |
| KRDYQS/ARNNI | 287 |
| KNDYYS/AYSYK | 288 |

### EXAMPLE 2.3

### Identification of Meganucleases Cleaving HSV4

[0437] I-CreI variants able to cleave each of the palindromic HSV4 derived targets (HSV4.3 and HSV4.4) were identified in Example 2.2. Pairs of such variants (one cutting HSV4.3 and one cutting HSV4.4) were co-expressed in yeast. Upon co-expression, there should be three active molecular species, two homodimers, and one heterodimer. It was assayed whether the heterodimers that should be formed, cut the non palindromic HSV4 target.

### A) Materials and Methods

### a) Construction of Target Vector

[0438] The experimental procedure is as described in Example 2.2, with the exception that an oligonucleotide corresponding to the HSV4 target sequence: 5′TGGCATACAAGTTTCCAAGCTGGTGTACCTGATAGTGGCAATCGTCTGTC A3′ (SEQ ID NO: 289) was used.

### b) Co-Expression of Variants

[0439] Yeast DNA was extracted from variants cleaving the HSV4.4 target in the pCLS1107 expression vector using standard protocols and was used to transform E. coli. The resulting plasmid DNA was then used to transform yeast strains expressing a variant cutting the HSV4.3 target in the pCLS542 expression vector. Transformants were selected on synthetic medium lacking leucine and containing G418.

### c) Mating of Meganucleases Coexpressing Clones and Screening in Yeast

[0440] Mating was performed using a colony gridder (QpixII, Genetix). Variants were gridded on nylon filters covering YPD plates, using a low gridding density (4-6 spots/cm²). A second gridding process was performed on the same filters to spot a second layer consisting of different reporter-harboring yeast strains for each target. Membranes were placed on solid agar YPD rich medium, and incubated at 30° C. for one night, to allow mating. Next, filters were transferred to synthetic medium, lacking leucine and tryptophan, adding G418, with galactose (2%) as a carbon source, and incubated for five days at 37° C., to select for diploids carrying the expression and target vectors. After 5 days, filters were placed on solid agarose medium with 0.02% X-Gal in 0.5 M sodium phosphate buffer, pH 7.0, 0.1% SDS, 6% dimethyl formamide (DMF), 7 mM βmercaptoethanol, 1% agarose, and incubated at 37° C., to monitor β-galactosidase activity. Results were analyzed by scanning and quantification was performed using appropriate software.

### B) Results

[0441] Co-expression of variants cleaving the HSV4.4 target (9 variants chosen among those described in Table XXIV) and 6 variants cleaving the HSV4.3 target (described in Table XXII) resulted in cleavage of the HSV4 target in some cases (FIG. 25). Functional combinations are summarized in Table XXV.

TABLE XXV
Cleavage of the HSV4 target by the heterodimeric variants

| | Amino acids at positions 28, 30, 32, 33, 38, 40/44, 68, 70, 75 and 77 | | | | | |
|---|---|---|---|---|---|---|
| | of the I-CreI variants cleaving the HSV4.3 target | | | | | |
| Amino acids at positions 28, | (ex: KRSRES/TYSNI stands for K28, R30, S32, R33, E38, S40/T44, Y68, | | | | | |
| 30, 32, 33, 38, 40/44, 68, | S70, N75 and I77) | | | | | |
| 70, 75 and HSV4.4 target | SNSYQK/ | | | | | |
| (ex: KRGYQS/RHRDI stands | MRNNI | SNSYQK/ | KNSYQS/ | KNSYQS/ | KNSYQS/ | KGSYQS/ |
| for K28, R30, G32, Y33, | 80K94L | LRNNI/ | MRANV/ | LRNNI/ | YRKDI | IRKNV/ |
| Q38, S40/R44, H68, R70, | (SEQ ID NO: | 80K (SEQ ID | 132V (SEQ | 80K (SEQ | (SEQ ID NO: | 132V (SEQ |
| D75 and I77) | 299) | NO: 300) | ID NO: 301) | ID NO: 302) | 303) | ID NO: 304) |
| KNDYYS/ | + | + | + | + | + | + |
| AYSYK (SEQ | | | | | | |
| ID NO: 290) | | | | | | |
| KNAYYS/ | | | | | | |
| AYSYK | | | | | | |
| (SEQ ID NO: | | | | | | |
| 291) | | | | | | |
| KRDYQS/ | + | + | + | + | + | + |
| ARNNI | | | | | | |
| (SEQ ID NO: | | | | | | |
| 292) | | | | | | |
| KNTYSS/ | + | + | + | + | + | + |
| AYSYK | | | | | | |
| (SEQ ID NO: | | | | | | |
| 293) | | | | | | |
| KNEYYS/ | + | + | + | + | + | + |
| AYSYK | | | | | | |
| (SEQ ID NO: | | | | | | |
| 294) | | | | | | |
| KNSRES/ | | | | | | |
| AYSYK | | | | | | |
| (SEQ ID NO: | | | | | | |
| 295) | | | | | | |
| KNSRES/ | + | + | + | + | + | + |
| NHSYN/ | | | | | | |
| 80K (SEQ ID | | | | | | |
| NO: 296) | | | | | | |
| KNTYWS/ | + | + | + | + | + | + |
| ARSYY | | | | | | |
| (SEQ ID NO: | | | | | | |
| 297) | | | | | | |
| KRDYQS/ | + | + | + | + | + | + |
| ACSYI/ | | | | | | |
| 115V (SEQ ID | | | | | | |
| NO: 298) | | | | | | |

+ indicates a functional combination

### EXAMPLE 2.4

### Improvement of Meganucleases Cleaving HSV4.3 by Random Mutagenesis

[0442] I-CreI variants able to cleave the palindromic HSV4.3 target has been previously identified in Example 2.1. Some of them can cleave HSV4 target when associated with variants able to cut HSV4.4 (Examples 2.2 and 2.3).

[0443] Therefore the 6 combinatorial variants cleaving HSV4.3 were mutagenized, and variants were screened for activity improvement on HSV4.3. According to the structure of the I-CreI protein bound to its target, there is no contact between the 4 central base pairs (positions −2 to 2) and the I-CreI protein (Chevalier et al., Nat. Struct. Biol., 2001, 8, 312-316; Chevalier and Stoddard, Nucleic Acids Res., 2001, 29, 3757-3774; Chevalier et al., J. Mol. Biol., 2003, 329, 253-269). Thus, it is difficult to rationally choose a set of positions to mutagenize, and mutagenesis was performed on the whole protein. Random mutagenesis results in high complexity libraries. Therefore, to limit the complexity of the variant libraries to be tested, the two components of the heterodimers cleaving HSV4 were mutagenized and screened in parallel.

### A) Material and Methods

### a) Construction of Libraries by Random Mutagenesis

[0444] Random mutagenesis was performed on a pool of chosen variants, by PCR using Mn²⁺. PCR reactions were carried out that amplify the I-CreI coding sequence using the primers preATGCreFor (5′-gcataaattactatacttctatagacacgcaaacacaaatacacagcggccttgccacc-3′; SEQ ID NO: 169) and ICreIpostRev (5′-ggctcgaggagctcgtctagaggatcgctcgagttatcagtcggccgc-3′; SEQ ID NO: 170), which are common to the pCLS0542 (FIG. 5) and pCLS1107 (FIG. 6) vectors. Approximately 25 ng of the PCR product and 75 ng of vector DNA (pCLS0542) linearized by digestion with NcoI and EagI were used to transform the yeast Saccharomyces cerevisiae strain FYC2-6A (MATα, trp1Δ⊖, leu2Δ1, his3Δ200) using a high efficiency LiAc transformation protocol (Gietz and Woods, Methods Enzymol., 2002, 350, 87-96). Expression plasmids containing an intact coding sequence for the I-CreI variant were generated by in vivo homologous recombination in yeast.

### b) Target Vector Yeast Strains

[0445] The yeast strain FYBL2-7B (MATα, ura3Δ851, trp1Δ63, leu2Δ1, lys2Δ02) containing the HSV4.3 target in the yeast reporter vector (pCLS1055 FIG. 4) was constructed as described in Example 2.1.

### c) Mating of Meganuclease Expressing Clones, Screening in Yeast and Sequencing

[0446] Mating HSV4.3 target strain and mutagenized variant clones and screening were performed as described in Example 2.1. One variant from the first generation was added as control on the filter during screening steps for activity improvement evaluation.

### B) Results

[0447] The 6 variants cleaving HSV4.3, (Table XXVI), were pooled, randomly mutagenized and transformed into yeast. 2304 transformed clones were then mated with a yeast strain that contains the HSV4.3 target in a reporter plasmid. After mating with this yeast strain, 86 clones were found to cleave the HSV4.3 target and 46 of them shown higher activity than the best original variant. An Example of positives is shown in FIG. 26. Sequencing of these 46 positive clones indicates that 38 distinct variants listed in Table XXVII were identified.

TABLE XXVI
pool of variants cleaving HSV4.3 and sequences
used as template for random mutagenesis

| | Amino acids positions and residues |
|---|---|
| SEQ ID NO: | of the I-CreI variants |
| 305 | 28S40K44M70N75N/80K94L |
| 306 | 28S40K44L70N75N/80K |
| 307 | 44M70A75N77V/132V |
| 308 | 44L70N75N/80K |
| 309 | 44Y70K/ |
| 310 | 30G44I70K75N77V/132V |

TABLE XXVII
Improved variants displaying strong cleavage activity for HSV4.3

| SEQ ID | Amino acids positions and residues |
|---|---|
| NO: | of the I-CreI variants |
| 311 | 28S30N32S33Y38Q40K44M70N75N77I/80K94L |
| 312 | 28S30N40K44M70N75N77I80K94F132I/56A |
| 313 | 28K30N40S44Y70K75N77I80K94F132V/ |
| 314 | 28S30N40K44M70N75N77I80R94L132I/ |
| 315 | 28S30N40K44M70N75N77I80K94L132V/ |
| 316 | 28K30G40S44M70A75N77V80E94F132V/4N155Q |
| 317 | 28K30N40S44M70N75N77I80K94F132I/82R163S |
| 318 | 28K30N40S44M70A75N77I80K94F132I/100R |
| 319 | 28S30N40K44L70N75N77I80R94F132V/ |
| 320 | 28K30N40S44Y70K75D77I80E94F132V/ |
| 321 | 28S30N40K44M70N75N77I80K94L132I/ |
| 322 | 28S30N40K44M70N75N77I80K94F132I/31R79C128R |
| 323 | 28K30N40S44Y70K75D77I80K94F132I/157D |
| 324 | 28K30N40S44M70N75N77I80K94F132I/3P68H69E |
| 325 | 28S30N40K44L70N75N77I80K94F132V/86D |
| 326 | 28S30N40K44M70N75N77I80K94F132I/ |
| 327 | 28K30N40S44Y70K75D77I80K94F132I/ |
| 328 | 28K30N40S44M70A75N77V80E94F132V/54L |
| 329 | 28S30N40K44M70N75D77I80K94F132V/108T154G |
| 330 | 28S30N40K44L70N75N77I80K94F132V/105D |
| 331 | 28S30N40K44L70N75N77I80K94F132V/43L |
| 332 | 28K30N40S44M70N75N77I80K94F132I/56V151A |
| 333 | 28K30G40S44M70A75N77V80E94F132V/156G |
| 334 | 28S30N40K44L70N75N77T80K94F132I/ |
| 335 | 28K30G40S44M70A75N77V80E94F132V/ |
| 336 | 28K30N40S44M70A75N77I80K94F132V/146K156G |
| 337 | 28S30N40K44M70K75N77V80E94F132V/ |
| 338 | 28K30N40S44M70A75N77I80K94F132I/117V |
| 339 | 28K30G40S44I70K75D77I80E94F132I/160E |
| 340 | 28S30N40K44L70N75N77I80K94F132V/ |
| 341 | 28S30N40K44L70N75N77I80K94F132I/7R79T102V |
| 342 | 28S30N40K44L70N75N77I80K94F132I/54V |
| 343 | 28K30N40S44M70N75N77I80K94F132I/ |
| 344 | 28S30N40K44M70N75N77M80R94F132I/71E105A |
| 345 | 28K30N40S44M70K75N77V80E94F132V/7E |
| 346 | 28S30N40K44M70N75N77I80K94F132I/116R |
| 347 | 28K30N40S44M70K75D77I80E94F132V/2Y |
| 348 | 28K30N40S44Y70K75D77I80E94F132V/79C120A152V |
| 349 | 28S30N40K44L70N75N77I80K94F132I/50R |

* Mutations resulting from random mutagenesis are in bold.

### EXAMPLE 2.5

### Improvement of Meganucleases Cleaving HSV4.4 by Random Mutagenesis

[0448] I-CreI variants able to cleave the palindromic HSV4.4 target has been previously identified in Example 2.2. Some of them can cleave HSV4 target when associated with variants able to cut HSV4.4 (Examples 2.1 and 2.3).

[0449] Therefore 9 of the 14 combinatorial variants cleaving HSV4.4 were mutagenized, and variants were screened for activity improvement on HSV4.4. As described in Example 2.5, mutagenesis was performed on the whole protein and HSV4.4 variants were screened in parallel of HSV4.3 (Example 2.5).

### A) Material and Methods

### a) Construction of Libraries by Random Mutagenesis

[0450] Random mutagenesis was performed as described in Example 2.5, on a pool of chosen variants, by PCR using the same primers and Mn²⁺ conditions (preATGCreFor SEQ ID NO: 169 and ICreIpostRev SEQ ID NO: 170). Approximately 25 ng of the PCR product and 75 ng of vector DNA pCLS1107) linearized by digestion with NcoI and EagI were used to transform the yeast Saccharomyces cerevisiae strain FYC2-6A (MATα; trp1Δ63, leu2Δ1, his3Δ200) using a high efficiency LiAc transformation protocol (Gietz and Woods, Methods Enzymol., 2002, 350, 87-96). Expression plasmids containing an intact coding sequence for the I-CreI variant were generated by in vivo homologous recombination in yeast.

### b) Target Vector Yeast Strains

[0451] The yeast strain FYBL2-7B (MATα, ura3Δ851, trp1Δ53, leu2Δ1, lys2Δ202) containing the HSV4.4 target in the yeast reporter vector (pCLS1055 FIG. 4) was constructed as described in Example 2.2.

### c) Mating of Meganuclease Expressing Clones, Screening in Yeast and Sequencing

[0452] Mating HSV4.4 target strain and mutagenized variant clones and screening were performed as described in Example 2.2. One variant from first generation was added as control on filter during screening steps for activity improvement evaluation.

### B) Results

[0453] Nine chosen variants cleaving HSV4.4, (Table XXVIII), were pooled, randomly mutagenized and transformed into yeast. 2304 transformed clones were then mated with a yeast strain that contains the HSV4.4 target in a reporter plasmid. After mating with this yeast strain, 262 clones were found to cleave the HSV4.4 target and 17 of them shown higher activity than the best original variant. An Example of positives is shown in FIG. 27. Sequencing 93 of these 262 positive clones indicates that 63 distinct variants listed in Table XXIX were identified. 14 of them shown higher activity than the best original variant.

TABLE XXVIII
pool of variants cleaving HSV4.4 and sequences used as template
for random mutagenesis

| SEQ ID | Amino acids positions and residues |
|---|---|
| NO: | of the I-CreI variants |
| 350 | 28K30N32D33Y38Y40S44A68Y70S75Y77K/ |
| 351 | 28K30N32S33R38E40S44N68Y70S75Y77K/ |
| 352 | 28K30R32D33Y38Q40S44A68R70N75N77I/ |
| 353 | 28K30N32T33Y38S40S44A68Y70S75Y77K/ |
| 354 | 28K30N32E33Y38Y40S44A68Y70S75Y77K/ |
| 355 | 28K30N32S33R38E40S44N68H70S75Y77N/80K |
| 356 | 28K30N32T33Y38W40S44A68R70S75Y77Y/ |
| 357 | 28K30R32D33Y38Q40S44A68C70S75Y77I/115V |
| 358 | 28K30N32S33R38E40S44A68Y70S75Y77K/ |

TABLE XXIX
Improved variants displaying strong cleavage activity for HSV4.4

| SEQ ID NO: | Amino acids positions and residues of the I-CreI variants |
|---|---|
| 359 | 32E38Y44A68Y70S75Y77K105A |
| 360 | 24F32E38Y44A68Y70S75Y77K107R |
| 361 | 32E38Y44A68Y70S75Y77K132V |
| 362 | 32D38Y44A68Y70S75Y77K |
| 363 | 32E38Y44A68Y70S75Y77K114Y |
| 364 | 1V32G38Y44A68Y70S75Y77K80K103S |
| 365 | 32D38Y44A68Y69G70S75Y77K80A105A162P |
| 366 | 32E38Y44A50R68Y70S75Y77K160E |
| 367 | 32E38Y44A68Y70S75Y77K |
| 368 | 33R38E44A54L68Y70S75Y77K103I |
| 369 | 32T38S44A68Y70S75Y77K124Q132V |
| 370 | 33R38E44A68Y70S75Y77K129A |
| 371 | 6S32E38Y44A68Y70S75Y77K111R |
| 372 | 32D38Y44A68Y70S75Y77N80K132V |
| 373 | 32D38Y44A68Y70S75Y77K164T |
| 374 | 32E38Y44A68Y70S75Y77K163R |
| 375 | 32D38Y44A68Y70S75Y77K82M110D117G132V163Q |
| 376 | 32E38Y44A68Y70S75Y77K162P |
| 377 | 32T36N38Y44A60G68S70S75Y77K107E110K132V |
| 378 | 32E38Y44A68Y70S75Y77K160N |
| 379 | 32E38Y44A68Y70S75Y77K163Q |
| 380 | 32E38Y43L44A68Y70S75Y77K |
| 381 | 32E38Y44A68Y70S75Y77K107R |
| 382 | 32E38Y44A68Y70S75Y77K151A |
| 383 | 2S32D38Y44A68Y70S75Y77K |
| 384 | 32D38Y44A66H68Y70S75Y77K152Q158E |
| 385 | 6S32D38Y44A68Y70S75Y77K |
| 386 | 32D38Y44A68Y70S75Y77K78I |
| 387 | 33R38Y44A68Y70S75Y77K100R161P |
| 388 | 32E38Y44A64A68Y70S72C75Y77K129A135Q156R |
| 389 | 32D38Y44A60N68Y70S75Y77K |
| 390 | 32E38Y44A68Y70S73I75Y77K87L |
| 391 | 32D38Y40C44A68Y70S75Y77K |
| 392 | 32E38Y44A49A68Y70S75Y77K |
| 393 | 33R38E44A68Y70S75Y77K85R |
| 394 | 32E38Y44A68Y70S75Y77K159R |
| 395 | 32K38Y44A68Y70S75Y77N134T |
| 396 | 32T33R38E44A68Y70S75Y77K |
| 397 | 30K32E38Y44A68Y70S75Y77K |
| 398 | 32E38Y44A68Y70S75Y77K96Q |
| 399 | 3S32E38Y44A68Y70S75Y77K |
| 400 | 32E38Y44A68Y70S75Y77K105G |
| 401 | 33R38E44A68Y70S75Y77K |
| 402 | 7E32D36N38Y44A68Y70S75Y77K |
| 403 | 30R31H32D44A49A68Y70S75Y77K |
| 404 | 32T38S44A68Y70S75Y77K114T |
| 405 | 33R38E44A68Y70S75Y77K163S |
| 406 | 33H38E44A66H68Y70S75Y77K |
| 407 | 32D38Y44A68Y70S72Y75Y77K |
| 408 | 33R38E44A68Y70S75Y77R97V161A |
| 409 | 13M32E38Y44A68Y70S75Y77K |
| 410 | 32E38Y44A68Y70S75Y77K107E |
| 411 | 30R32D44A68Y70S75Y77K100N |
| 412 | 30R32D44A68Y70S75Y77K114T120A |
| 413 | 32E38Y44A64A68Y70S75Y77K82M |
| 414 | 30R32D44A68Y70S75Y77K |
| 415 | 32D38Y44A68Y70S71E75Y77K |
| 416 | 33R38E44A57R68Y70S75Y77K |
| 417 | 32T38W44A70S75Y77Y80K110D |
| 418 | 30R32D44A68Y70S75Y77K107R |
| 419 | 32T38S44A68Y70S75Y77K120G |
| 420 | 33R38E44N68H70S75Y77N80K111H131R132V |
| 421 | 32D38Y44A54L68Y70S75Y77K79G129A156G |

* Mutations resulting from random mutagenesis are in bold.

### EXAMPLE 2.6

### Identification of Improved Meganucleases Cleaving HSV4

[0454] Improved I-CreI variants able to cleave each of the palindromic HSV4 derived targets (HSV4.3 and HSV4.4) were identified in Example 2.5 and Example 2.6. As described in Example 2.3, pairs of such variants (one cutting HSV4.3 and one cutting HSV4.4) were co-expressed in yeast. The heterodimers that should be formed were assayed for cutting the non palindromic HSV4 target.

### A) Materials and Methods

### a) Construction of Target Vector

[0455] The HSV4 target vector was constructed as described in Example 2.3.

### b) Co-Expression of Variants

[0456] Yeast DNA was extracted from variants cleaving the HSV4.4 target in the pCLS1107 expression vector using standard protocols and was used to transform E. coli. The resulting plasmid DNA was then used to transform yeast strains expressing a variant cutting the HSV4.3 target in the pCLS542 expression vector. Transformants were selected on synthetic medium lacking leucine and containing G418.

### c) Mating of Meganucleases Coexpressing Clones and Screening in Yeast

[0457] Mating and screening of meganucleases coexpressing clones were performed as described in Example 2.3. Results were analyzed by scanning and quantification was performed using appropriate software.

### B) Results

[0458] Co-expression of improved variants cleaving the HSV4.4 target (6 variants chosen among those described in Table XXIX) and 6 improved variants cleaving the HSV4.3 target (described in Table XXVII) resulted in cleavage of the HSV4 target in all of cases (FIG. 28). All assayed combinations are summarized in Table XXX.

TABLE XXX
Cleavage of the HSV4 target by the heterodimeric improved variants

| Amino acids at positions 28, | Amino acids at positions 28, 30, 32, 33, 38, 40/44, 68, 70, 75 and 77 | | | | | |
|---|---|---|---|---|---|---|
| 30, 32, 33, 38, 40/44, 68, | of the I-CreI variants cleaving the HSV4.3 target (ex: KRSRES/TYSNI | | | | | |
| 70, 75 and 77 Of I-CreI | stands for K28, R30, S32, R33, E38, S40/T44, Y68, S70, N75 and I77) | | | | | |
| variants cleaving the | | KNSYQS/ | SNSYQK/ | KNSYQS/ | | |
| HSV4.4 target (ex: KRGYQS/ | SNSYQK/ | MRANI/ | LRNNI/ | MRANV/ | SNSYQK/ | KNSYQS/ |
| RHRDI stands for K28, R30, | LRNNI/ | 80K132V146K | 80K132V/43L | 54L132V | MRNNI/ | MRKDI/ |
| G32, Y33, Q38, S40/R44, H68, | 80R132V (SEQ | 156G (SEQ | (SEQ ID | (SEQ ID | 80K (SEQ | 2Y132V (SEQ |
| R70, D75 and I77) | ID NO: 428) | ID NO: 429) | NO: 430) | NO: 431) | ID NO: 432) | ID NO: 433) |
| KNEYYS/ | + | + | + | + | + | + |
| AYSYK/ | | | | | | |
| 50R160E (SEQ | | | | | | |
| ID NO: 422) | | | | | | |
| KNEYYS/ | + | + | + | + | + | + |
| AYSYK/ | | | | | | |
| 69G80A105A162P | | | | | | |
| (SEQ ID NO: | | | | | | |
| 423) | | | | | | |
| KNEYYS/ | + | + | + | + | + | + |
| AYSYK/132V | | | | | | |
| (SEQ ID NO: 424) | | | | | | |
| KNEYYS/ | + | + | + | + | + | + |
| AYSYK/ | | | | | | |
| 24F107R (SEQ | | | | | | |
| ID NO: 425) | | | | | | |
| KNGYYS/ | + | + | + | + | + | + |
| AYSYK/ | | | | | | |
| 1V80K103S | | | | | | |
| (SEQ ID NO: 426) | | | | | | |
| KNEYYS/ | + | + | + | + | + | + |
| AYSYK/105A | | | | | | |
| (SEQ ID NO: 427 | | | | | | |

+ indicates a functional combination

### EXAMPLE 2.7

### Validation of HSV4 Target Cleavage in an Extrachromosomal Model in CHO Cells

[0459] I-CreI variants able to efficiently cleave the HSV4 target in yeast when forming heterodimers were described in Examples 2.3 and 2.7. In order to identify heterodimers displaying maximal cleavage activity for the HSV4 target in CHO cells, the efficiency of chosen combinations of variants to cut the HSV4 target was compared, using an extrachromosomal assay in CHO cells. The screen in CHO cells is a single-strand annealing (SSA) based assay where cleavage of the target by the meganucleases induces homologous recombination and expression of a LagoZ reporter gene (a derivative of the bacterial lacZ gene).

### 1) Materials and Methods

### a) Cloning of HSV4 Target in a Vector for CHO Screen

[0460] The target was cloned as follows: oligonucleotide corresponding to the HSV4 target sequence flanked by gateway cloning sequence was ordered from PROLIGO 5′TGGCATACAAGTTTCCAAGCTGGTGTACCTGATAGTGGCAATCGTCTGTC A3′ (SEQ ID NO: 289). Double-stranded target DNA, generated by PCR amplification of the single stranded oligonucleotide, was cloned using the Gateway protocol (INVITROGEN) into CHO reporter vector (pCLS1058, FIG. 11). Cloned target was verified by sequencing (MILLEGEN).

### b) Re-Cloning of Meganucleases

[0461] The ORF of I-CreI variants cleaving the HSV4.3 and HSV.4 targets identified in Examples 2.5 and 2.6 were re-cloned in pCLS1768 (FIG. 29). ORFs were amplified by PCR on yeast DNA using the attB1-ICreIFor (5′-ggggacaagtftgtacaaaaaagcaggcttcgaaggagatagaaccatggccaataccaaatataacaaagagttcc-3′; SEQ ID NO: 434) and attB2-ICreIRev (5′-ggggaccactttgtacaagaaagctgggtttagtcggccgccggggaggatttcttcttacgc-3′; SEQ ID NO: 435) primers. PCR products were cloned in the CHO expression vector pCLS1768 (FIG. 29) using the Gateway protocol (INVITROGEN). Resulting clones were verified by sequencing (MILLEGEN).

### c) Extrachromosomal Assay in Mammalian Cells

[0462] CHO K1 cells were transfected with Polyfect® transfection reagent according to the supplier's protocol (QIAGEN). 72 hours after transfection, culture medium was removed and 1500 of lysis/revelation buffer for β-galactosidase liquid assay was added (typically 1 liter of buffer contained: 100 ml of lysis buffer (Tris-HCl 10 mM pH7.5, NaCl 150 mM, Triton X100 0.1%, BSA 0.1 mg/ml, protease inhibitors), 10 ml of Mg 100× buffer (MgCl₂ 100 mM, β-mercaptoethanol 35%), 110 ml ONPG 8 mg/ml and 780 ml of sodium phosphate 0.1M pH7.5). After incubation at 37° C., OD was measured at 420 nm. The entire process is performed on an automated Velocity 11 BioCel platform.

[0463] Per assay, 150 ng of target vector was cotransfected with 12.5 ng of each one of both mutants (12.5 ng of mutant cleaving palindromic HSV4.3 target and 12.5 ng of mutant cleaving palindromic HSV4.4 target).

### 2) Results

[0464] 6 variants cleaving HSV4.3 and 4 variants cleaving HSV4.4 described in Example 2.5, 2.6 and 2.7 were re-cloned in pCLS1768 (FIG. 29). Then, I-CreI variants cleaving the HSV4.3 or HSV4.4 targets were assayed together as heterodimers against the HSV4 target in the CHO extrachromosomal assay.

[0465] Table XXXIII shows the functional combinations obtained for 24 heterodimers. Analysis of the efficiencies of cleavage and recombination of the HSV4 sequence demonstrates that 9 combinations of I-CreI variants are able to transpose their cleavage activity from yeast to CHO cells without additional mutation.

TABLE XXXI
Functional heterodimeric combinations cutting the HSV4 target in CHO cells.

| | | Optimized variants cleaving HSV4.3 | | | | | |
|---|---|---|---|---|---|---|---|
| | | 28S40K44L | | 28S40K43L44L | 44M54L70A | | |
| | | 70N80R132V | 44M70A80K | 70N80K132V | 77V132V | 28S40K44M | 2Y44M70K |
| | | (SEQ ID NO: | 132V146K156G | (SEQ ID NO: | (SEQ ID NO: | 70N80K (SEQ ID | 132V (SEQ |
| | | 440) | (SEQ ID NO: 441) | 442) | 443) | NO: 444) | ID NO: 445) |
| Optimized variants | 32D38Y44A68Y | | + | + | + | + | |
| cleaving HSV4.4 | 69G70S75Y77 | | | | | | |
| | K80A105A162P | | | | | | |
| | (SEQ ID NO: 436) | | | | | | |
| | 24F32E38Y44A | | | | | | |
| | 68Y70S75Y77K | | | | | | |
| | 107R (SEQ ID NO: | | | | | | |
| | 437) | | | | | | |
| | 70S75Y77K | | | | | | |
| | 80K103S (SEQ ID | | | | | | |
| | NO: 438) | | | | | | |
| | 32E38Y44A68Y | | + | + | + | + | + |
| | 70S75Y77K105A | | | | | | |
| | (SEQ ID NO: 439) | | | | | | |

+ indicates a functional combination

### EXAMPLE 2.8

### Covalent Assembly as Single Chain and Improvement of Meganucleases Cleaving HSV4 by Site-Directed Mutagenesis

[0466] Coexpression of the cutters described in Example 2.6, 2.7, 2.8 leads to a high cleavage activity of the HSV4 target in yeast. Some of them are able to cleave HSV4 in a mammalian expression system. One of them is shown as Example in Table XXXII.

TABLE XXXII
Functional heterodimer cutting the HSV4 target in CHO cells.

| | |
|---|---|
| HSV4.3-M2 (SEQ ID NO: 35) | 44M 70A 80K 132V 146K 156G |
| HSV4.4-MF (SEQ ID NO: 36) | 32E 38Y 44A 68Y 70S 75Y 77K 105A |

[0467] The M2/MF HSV4 heterodimer gives high cleavage activity in yeast and CHO cells. M2 is a HSV4.3 cutter that bears the following mutations in comparison with the I-CreI wild type sequence: 44M, 70A, 80K, 132V, 146K, 156G. MF is a HSV4.4 cutter that bears the following mutations in comparison with the I-CreI wild type sequence: 32E, 38Y, 44A, 68Y, 70S, 75Y, 77K, 105A.

[0468] Single chain constructs were engineered using the linker RM2 resulting in the production of the single chain molecule: M2-RM2-MF. During this design step, the G19S mutation was introduced in the C-terminal MF mutant. In addition, mutations K7E, K96E were introduced into the M2 mutant and mutations E8K, E61R into the MF mutant to create the single chain molecule: M2(K7E K96E)-RM2-MF(E8K E61R) that is called further SCOH-HSV4-M2-MF.

[0469] Four additional amino-acid substitutions have been found in previous studies to enhance the activity of I-CreI derivatives: these mutations correspond to the replacement of Phenylalanine 54 with Leucine (F54L), Glutamic acid 80 with Lysine (E80K), Valine 105 with Alanine (V105A) and Isoleucine 132 with Valine (I132V). Some of these are already present in HSV4.3 and HSV4.4 variants (i.e. HSV4.3-M2 and HSV4.4-MF). Some additional combinations were introduced into the coding sequence of N-terminal and C-terminal protein fragment (Example in Table XXXIII), and the resulting proteins were tested for their ability to induce cleavage of the HSV4 target. Twelve single chain constructs were then tested in CHO for cleavage of the HSV4 target.

TABLE XXXIII
Example of single chain I-CreI variants assayed for HSV4 cleavage in CHO cells.

| | | | | SEQ |
|---|---|---|---|---|
| Construct | Single Chain | Mutations on N-terminal segment | Mutations on C-terminal segment | ID NO |
| pCLS2470 | SCOH-HSV4-M2-MF | 7E 44M 70A 80K 96E 132V 146K | 8K 19S 32E 38Y 44A 61R 68Y 70S | 446 |
| | | 156G | 75Y 77K 105A | |
| pCLS2471 | SCOH-HSV4-M2-MF-54L | 7E 44M 70A 80K 96E 132V 146K | 8K 19S 32E 38Y 44A 61R 68Y 70S | 447 |
| | | 156G | 75Y 77K 105A 132V | |
| pCLS2472 | SCOH-HSV4-M2-MF-132V | 7E 44M 70A 80K 96E 132V 146K | 8K 19S 32E 38Y 44A 54L 61R 68Y | 448 |
| | | 156G | 70S 75Y 77K 105A | |
| pCLS2474 | SCOH-HSV4-M2-54L-MF | 7E 44M 54L 70A 80K 96E 132V | 8K 19S 32E 38Y 44A 61R 68Y 70S | 449 |
| | | 146K 156G | 75Y 77K 105A | |
| pCLS2476 | SCOH-HSV4-M2-54L-MF-132V | 7E 44M 54L 70A 80K 96E 132V | 8K 19S 32E 38Y 44A 54L 61R 68Y | 450 |
| | | 146K 156G | 70S 75Y 77K 105A | |
| pCLS2477 | SCOH-HSV4-M2-54L-MF- | 7E 44M 54L 70A 80K 96E 132V | 8K 19S 32E 38Y 44A 61R 68Y 70S | 451 |
| | 80K132V | 146K 156G | 75Y 77K 80K 105A 132V | |
| pCLS2478 | SCOH-HSV4-M2-105A-MF | 7E 44M 70A 80K 96E 105A 132V | 8K 19S 32E 38Y 44A 61R 68Y 70S | 452 |
| | | 146K 156G | 75Y 77K 105A | |
| pCLS2479 | SCOH-HSV4-M2-105A-MF-132V | 7E 44M 70A 80K 96E 105A 132V | 8K 19S 32E 38Y 44A 61R 68Y 70S | 453 |
| | | 146K 156G | 75Y 77K 105A 132V | |
| pCLS2481 | SCOH-HSV4-M2-105A-MF- | 7E 44M 70A 80K 96E 105A 132V | 8K 19S 32E 38Y 44A 61R 68Y 70S | 454 |
| | 80K132V | 146K 156G | 75Y 77K 80K 105A 132V | |
| pCLS2790 | SCOH-HSV4-M2-105A-MF- | 7E44M70A80K96E105A132V | 8K19S32E38Y44A61R68Y70S75Y77K | 534 |
| | 80K132V | 146K156G | 80K105A132V | |

[0470] pCLS2790 bears the same variant than pCLS2481 under the control of pCMV promoter (instead of pEF1 alpha).

### 1) Material and Methods

### a) Cloning of the SC_OH Single Chain Molecule

[0471] A series of synthetic gene assembly was ordered to TOPGENE TECHNOLOGY. Synthetic genes coding for the different single chain variants targeting HSV4 were cloned in pCLS0491 (FIG. 31) using Eco RI and Barn HI restriction sites.

### b) Extrachromosomal Assay in Mammalian Cells

[0472] CHO K1 cells were transfected as described in Example 2.8. 72 hours after transfection, culture medium was removed and 150 μl of lysis/revelation buffer for β-galactosidase liquid assay was added. After incubation at 37° C., OD was measured at 420 nm. The entire process is performed on an automated Velocity11 BioCel platform.

[0473] Per assay, 150 ng of target vector was cotransfected with an increasing quantity of variant DNA from 0.75 to 50 ng (50 ng of single chain DNA corresponding to 25 ng+25 ng of heterodimer DNA). Finally, the transfected DNA variant DNA quantity was 0.78 ng, 1.56 ng, 3.12 ng, 6.25 ng, 12.5 ng, 25 ng and 50 ng. The total amount of transfected DNA was completed to 200 ng (target DNA, variant DNA, carrier DNA) using empty vector (pCLS0001).

### 2) Results

[0474] The activity of the SCOH-HSV4 single chain molecules (Table XXXIII) against the HSV4 target was monitored using the previously described CHO assay by comparison to the HSV4.3-M2×HSV4.4-MF heterodimer and our internal control SCOH-RAG (SEQ ID NO: 468) and I-SceI (SEQ ID NO: 469) meganucleases. All comparisons were done at 0.78 ng, 1.56 ng, 3.12 ng, 6.25 ng, 12.5 ng, 25 ng and 50 ng transfected variant DNA.

[0475] All assayed single chain variants are more active than M2×MF heterodimer and the internal control I-SceI at standard dose (25 ng). Variants shared specific behaviour upon assayed dose depending on the mutation profile they bear (FIGS. 33 and 34). For Example, scOH-HSV4-M2-54L-MF (pCLS2474, SEQ ID NO: 449) has a similar profile to our internal standard SCOH-RAG: its activity increase from low quantity to high quantity (FIG. 35). scOH-HSV4-M2-105A-MF-80K132V (pCLS2481, SEQ ID NO: 454) is highly active at low quantities of transfected DNA (3.12 ng) and its apparent activity decreases with dose (FIG. 36). scOH-HSV4-M2-MF-132V (pCLS2472, SEQ ID NO: 448) shares an intermediate profile between the two previous ones (FIG. 37). The profile of scOH-HSV4-M2-MF (pCLS2470, SEQ ID NO: 446), which is a common scaffold to all assayed single chain variants, is an average of individual behaviors at low DNA quantity (max at 6.25 ng) and decreases quickly with DNA dose (the lowest at 50 ng) (FIG. 38). All of these variants could be used for HSV-1 genome targeting depending on the tissue infected.

### EXAMPLE 3

### Inhibition of Viral Replication by I-CreI Variants Cleaving HSV2, HSV4 or HSV12 Target Sequences

[0476] Single-chain obligate heterodimer I-CreI variants able to efficiently cleave the HSV2 or HSV4 target sequences in yeast and CHO cells were described in Examples 1 and 2.

[0477] Single chain obligate heterodimer constructs were also generated for the I-CreI variants able to cleave the HSV12 target sequences described in Table II. These single chain constructs were engineered using the linker RM2 (AAGGSDKYNQALSKYNQALSKYNQALSGGGGS) (SEQ ID NO: 464). During this design step, mutations K7E, K96E were introduced into the M1 or the M1-80K mutant and mutations E8K, E61R into the ME-132V mutant to create the single chain molecules: M1(K7E K96E)-RM2-ME-132V(E8K E61R) that is called SCOH-HSV12-M1-ME-132V and M1-80K(K7E K96E)-RM2-ME-132V(E8K E61R) that is called SCOH-HSV12-M1-80K-ME-132V (Table XXXIV).

TABLE XXXIV
Example of single chain I-CreI variants for HSV12

| | | Mutations on N-terminal | Mutations on C-terminal | SEQ |
|---|---|---|---|---|
| Construct | Single Chain | segment | segment | ID NO |
| pCLS2633 | SCOH-HSV12-M1-ME-132V | 7E 24V 33C 38S 44I 50R | 8K 19S 30R 33S 44K 61R | 465 |
| | | 70S 75N 77R 96E 132V | 66H 68Y 70S 77T 87I | |
| | | | 132V 139R 163S | |
| pCLS2635 | SCOH-HSV12-M1-80K-ME- | 7E 24V 33C 38S 44I 50R | 8K 19S 30R 33S 44K 61R | 466 |
| | 132V | 70S 75N 77R 80K 96E | 66H 68Y 70S 77T 87I | |
| | | 132V | 132V 139R 163S | |

[0478] In order to further validate the cleavage activity of these single chain molecules, the ability of I-CreI variants cleaving HSV2, HSV4 or HSV12 target sequences to inhibit viral replication was examined using a recombinant Herpes Simplex Virus (rHSV-1). rHSV was constructed with a cassette containing a CMV promoter driving the LacZ gene (FIG. 39). An I-SceI target site was inserted between the CMV promoter and the LacZ gene and served as a positive control for inactivation of the virus. This expression cassette was introduced into the major LAT locus of HSV by homologous recombination resulting in LacZ expression during lytic infection of COS-7 cells. Thus to evaluate the inhibition of viral replication, the ability of I-SceI or the I-CreI variants cleaving HSV2, HSV4 or HSV12 target sequences to diminish LacZ expression after infection with rHSV1 was evaluated.

### 1) Material and Methods

### a) Single Chain Obligate Heterodimer (SC_OH) Molecules

[0479] Single chain obligate heterodimer molecules were generated for the I-CreI variants able to cleave the HSV12 target sequences described in Table II by custom gene synthesis (MWG-EUROFINS). Synthetic genes coding for the different single chain variants targeting HSV12 were cloned in pCLS1853 (FIG. 14) using AscI and XhoI restriction sites.

### b) Cells and Viruses

[0480] Viruses were grown and assayed on COS-7 cells. COS-7 cells were cultured in DMEM supplemented with 2 mM L-glutamine, penicillin (100 IU/ml), streptomycin (100 mg/ml), amphotericin B (Fongizone: 0.25 mg/ml, Invitrogen-Life Science) and 10% FBS. HSV-1 was purchased from the American Type Culture Collection (ATCC). Viruses were propagated at a multiplicity of infection of 0.003 PFU/cell and virus titers were determined by plaque assays.

### c) Construction of Recombinant HSV-1

[0481] Recombinant virus was generated in a manner similar to that previously described (Lachmann, R.H., Efstathioun S., 1997, Journal of Virology, 3197-3207). An approximately 4.6 kb PstI-BamHI viral genomic fragment was cloned into pUC19. Based on HSV-1 sequence from the database (GenBank NC_{—}001806) this represents nucleotides 118869-123461 and 7502-2910 in the inverted terminal repeats of the HSV-1 genome. A cassette containing the CMV promoter driving LacZ expression was introduced into a 19 bp SmaI/HpaI deletion. This region is located within the major LAT locus of HSV-1. The I-SceI cleavage site (tagggataacagggtaat SEQ ID NO: 467) was inserted after the CMV promoter and before the ATG of the LacZ gene. This construct (pCLS0126, FIG. 40) was used to generate recombinant viruses. Plasmid was linearized by XmnI digestion and 2 μg of this plasmid was co-transfected with 10 μg of HSV-1 genomic DNA into COS-7 cells using Lipofectamine 2000 (Invitrogen). After 3 days, infected cells were harvested and sonicated. An aliquot of the lysed cells was used to infect a COS monolayer and cells were overlayed with 1% agarose medium. After 3 days, 300 μg/ml of X-gal (5-bromo-4-chloro-3-indolyl-β-D-galactopyranoside) was added to the overlay. β-galactosidase positive ‘blue’ plaques were picked and subjected to three rounds of plaque purification.

### d) Viral Inhibition

[0482] 6-well plates were seeded with 2×10⁵ cells per well. The next day COS-7 cells were transfected using lipofectamine 2000 (Invitrogen) with either 1 μg or 5 μg of plasmid expressing I-SceI or the I-CreI variants cleaving HSV2, HSV4 or HSV12 target sequences, the total volume of DNA was completed to 5 μg with empty vector pCLS0001 (FIG. 15). The transfection efficiency was between 50-70% using this method. Twenty-four hours later, subconfluent transfected cells were infected with rHSV1 or a wild type F1 strain (ATCC, ref VR-733). For infection, virus was diluted in DMEM without serum at a MOI from 10⁻³ to 1 adsorbed onto cells for 2 h at 37° C. and then diluted in complete growth medium to a final volume of 2 ml per well. Cells were harvested 24 h after infection and β-galactosidase activity was assayed on a total of 1.0×10³ (for MOI 10⁻² to 10⁻¹) or 2.5×10⁴ (for MOI 10⁻³) rHSV infected-cells using a luminescent β-galactosidase assay (Beta-Glo assay, Promega). Results are converted to % of reduction of viral infection.

### e) Quantification of Viral DNA

[0483] Total DNA (COS-7 and viral genomes) from transfected and infected COS-7 cells was extracted and purified using DNeasy Blood and Tissue Kit (Qiagen, France) according to the manufacturer's instructions. Then, the relative quantity of viral DNA was determined via real-time PCR using primers specific to the HSV genome (gB gene) normalized to COS-7 DNA level using primers specific to the glyceraldehyde-3-phosphate deshydrogenase (GAPDH) gene. Oligonucleotide primers used for PCR corresponding to a part of gB gene from viral DNA are forward primer: 5′-AGAAAGCCCCCATTGGCCAGGTAGT (SEQ ID NO:536) and reverse primer: 5′-ATTCTCTTCCGACGCCATATCCACCAC (SEQ ID NO:537) and those corresponding to a part of GAPDH gene from COS-7 DNA are forward primer: 5′-GGCAGAACCCGGGTTTATAACTGTC (SEQ ID NO:538) and reverse primer: 5′-CCAGTCCTGGATGAGAAAGG (SEQ ID NO:539). The PCR was carried out using SYBR Premix Ex taq (TaKaRa, Japan) and PCR amplification included initial denaturation at 95° C. for 5 min, followed by 40 cycles of 95° C. for 15 seconds, 60° C. for 15 seconds, and 72° C. for 30 seconds. Each PCR assay contained a negative control and a series of plasmid DNA dilutions which can be amplified efficiently, to generate the standard curve. Results are converted to % of reduction of viral DNA level.

### f) Meganuclease Expression

[0484] COS-7 cells were harvested 24 or 48 hours after the transfection with 0.3 or 5 μg of plasmid expressing I-CreI variants and directly solubilised in Laemmli buffer (100 μl of buffer for 10⁶ cells). The equivalent of 10⁵ cells was loaded on a SDS-PAGE gel and probed by western blot using a rabbit polyclonal antibody against I-CreI.

g) PCR and Sequencing Analysis of rHSV-1 Genome

[0485] Total DNA (COS-7 and rHSV-1 genomes) from transfected and infected COS-7 cells was extracted and purified using DNeasy Blood and Tissue Kit (Qiagen, France) according to the manufacturer's instructions. For each tested sample, we designed a pair of tag-forward and biotin-labeled reverse PCR primers recognising a part of rHSV-1 genome corresponding to the HSV2 and HSV4 target sequences. The DNA polymerase used was Herculase II Fusion DNA Polymerase (Stratagene, France). PCR reactions were run during 30 cycles with an annealing temperature of 67° C. The PCR reaction products were resolved on 0.8% TAE/agarose gel. DNA fragments were purified using NucleoSpin Extract II kit (Qiagen, France) according to the manufacturer's instructions before sending them to GATC Biotech (France) for sequence analysis.

### g) Wild Type HSV-1 Virus and BSR Cells

[0486] The wild-type SC16 strain of HSV-1 was grown on BSR cells. BSR cells, cloned from baby hamster kidney cells (BHK-21), were obtained from American Type Culture Collection (ATCC) (Teddington, UK) and maintained in Dulbecco's modified Eagle medium (D-MEM) supplemented with 10% foetal calf serum serum, 100 U/ml penicillin and 100 μg/ml streptomycin sulfate (PAA Laboratories, Austria). Viruses were concentrated before titration and kept frozen at −80° C. A titration in BSR cells was performed after thawing and dilution (i.e. immediately before use). Plaques were counted the following day.

### i) Transfection of BSR Cells and Infection by Wild-Type SC16 Strain of HSV-1

[0487] The day before transfection, BSR cells were seeded in 6-well culture dishes (Falcon, Becton Dickinson, Le Pont De Claix, France) at 2×10⁵ cells per well and incubated overnight at 37° C. in complete growth medium. The cultures were about 65% confluent on the day of transfection. Co-transfections with 1.5 μg of plasmid expressing I-CreI variants cleaving HSV2, HSV4 or HSV12 target sequences and 1.5 μg of plasmid expressing GFP were done using LipofectAMINE 2000 (LF2000, Invitrogen Life Technologies, Carlsbad, Calif.) according to the manufacturer's instructions. A control vector was used to monitor background expression of GFP protein in BSR cells. Forty-eight hours after the co-transfection step, cells were infected with wild-type SC16 strain of HSV-1 at the multiplicity of infection (MOI) varying from 0.1 to 8.

### i) Immunofluorescent Cell Staining and Confocal Microscopy

[0488] The BSR transfected cells were cultured on glass coverslips 24 h before fixation with 4% paraformaldehyde (PFA) in PBS at room temperature (RT) for 15 min. The cells then were washed twice with PBS and permeabilized with 0.2% Triton X-100 in PBS for 15 min at RT. Non-specific staining was blocked with 0.5% bovine serum albumin (BSA) in PBS. The coverslips were then incubated with the polyclonal rabbit antibody against I-CreI in 0.5% BSA in PBS for 2 h. The monoclonal mouse antibody against the glycoprotein C (gC) of HSV-1 was used at 1:500 dilution. The coverslips were incubated with rhodamine-conjugated anti-mouse IgG (Immunotech, Marseille, France) at 1:150 dilution. The immunofluorescence was analysed using a Leica DMR confocal microscope with a 40× objective.

### k) FACS Analysis

[0489] Following 48 h of transfection, cells were infected for 8 h with SC-16 before being washed twice in PBS, resuspended in 500 μl of ice-cold PBS and fixed with 500 μl of 2% PFA in PBS at RT for 15 min. Fixed cells were counted with a heamocytometer and an aliquot of 2.5×10⁵ cells were placed in a 1.5 ml Eppendorf tube. Cells were incubated with i) 1:500 dilution of anti-amino acids 290 to 300 of glycoprotein C (gC) of HSV-1 rabbit antibodies (Sigma Aldrich, H6030) for 2 h; and ii) with 1:500 dilution of phycoerytrine (PE) conjugated goat anti-rabbit IGg seconder antibodies 1 h (Santa Cruz Biotechnology, Inc), with 3 washes in PBS before each step. Fluorescence-activated cell sorting (FACS) analysis was then performed on a Cytometer EPICS ELITE ESP (Beckman-Coulter) using a 488 nm emitting laser used for detection to detect either EGFP (488 nm) or PE (506 nm) emissions. Non-transfected cells were used as a negative control for GFP emission while non-infected cells stained with primary and secondary antibody were used as a negative control for PE. Thresholds were set-up to include viable cells only, as assessed by forward scatter data, and to include a range of fluorescence representing less than 1% of the fluorescence of control cells.

### 2) Results

[0490] a) Meganucleases Prevent the Infection of COS-7 Cells by an rHSV-1 Virus

[0491] Three single chain variants cleaving the HSV4 target sequence (pCLS2472, SCOH-HSV4-M2-MF-132V, SEQ ID NO: 448; pCLS2474, SCOH-HSV4-M2-54L-MF, SEQ ID NO: 449 and pCLS2481, SCOH-HSV4-M2-105A-MF-80K132V, SEQ ID NO: 454) described in Example 2.8, three single-chain variants cleaving the HSV2 target sequence described in Example 1.8 (pCLS2457, SCOH-HSV2-M1-MC-132V, SEQ ID NO: 254; pCLS2459, SCOH-HSV2-M1-MC-80K105A132V, SEQ ID NO: 256 and pCLS2465, SCOH-HSV2-M1-105A132V-MC-132V, SEQ ID NO: 261) and two single chain variants cleaving the HSV12 target sequence (pCLS2633, SCOH-HSV12-M1-ME-132V, SEQ ID NO: 465; pCLS2635, SCOH-HSV12-M1-80K-ME-132V, SEQ ID NO: 466) described in Table XXXIV were tested for their ability to inhibit viral replication of rHSV-1.

[0492] FIG. 41 shows the results obtained for the eight single-chain variants as well as I-SceI compared to cells treated with empty vector only. Transfection of 5 μg I-SceI expression vector before viral infection results in a significant reduction in LacZ activity (greater than 3-fold), the levels of LacZ activity observed are only 31% of those observed following transfection of an empty vector. The single-chain obligate heterodimer variants cleaving the HSV4, HSV2 or HSV12 target sequences display reductions in LacZ activity similar to that of I-SceI (2- to 4-fold). The level of LacZ activity observed was 25-51% of that observed with an empty vector.

[0493] The most efficient I-CreI variants cleaving the HSV2, HSV4 and HSV12 target sequences, SCOH-HSV2-M1-MC-80K105A132V (pCLS2459, SEQ ID NO: 256), SCOH-HSV4-M2-105A-MF-80K132V (pCLS2790, SEQ ID NO:534) and SCOH-HSV12-M1-ME-132V (pCLS2633, SEQ ID NO:465), respectively, were characterized further (FIG. 44). pCLS2790 (SEQ ID NO: 534) differs from pCLS2481 (SEQ ID NO: 454) by the presence of a CMV promoter. These three meganucleases were assayed in four independent experiments, and viral load was estimated with two different methods: measurement of β-galactosidase activity (FIG. 44) and monitoring of viral DNA content by Q-PCR (FIG. 45). Both assays gave reproducible and consistent results, with the HSV2 meganuclease having a significantly higher inhibitory effect. Differences in efficacy can reflect expression level, specific activity of the endonuclease, or accessibility of the target (related to epigenetic modifications of the targeted locus). Western blotting demonstrated that the meganucleases were not expressed at similar levels (FIG. 46). HSV2 expression is higher than other meganucleases in COS-7 cells.

[0494] To further characterize the anti-viral potential of the I-CreI variants cleaving the HSV2, HSV4 and HSV12 target sequences, cells were infected at a MOI of 10⁻² and 10⁻¹ and viral load was monitored 24 hours post-infection by Q-PCR (FIG. 53). Efficient inhibition of viral infection was observed with all three meganucleases, HSV2, HSV4 and HSV12, in all conditions, with up to 64% reduction of viral load at a MOI of 10⁻¹ (FIG. 53). These results indicate that at higher levels of infection the HSV meganucleases display an efficient anti-viral activity.

b) Anti-HSV Meganucleases Induce High Rates of Mutations at their Target Site.

[0495] The inhibition of HSV-1 infection by the anti-HSV meganucleases is thought to be due to cleavage of viral DNA. Cleavage of an episomal sequence can result in its degradation and loss, but also to its repair by the endogenous maintenance systems of the cell. DNA double strand breaks (DSBs) can be repaired by homologous recombination (HR) or by non homologous end joining (NHEJ), two alternative pathways. Following cleavage by an endonuclease, HR or NHEJ will in most of the cases reseal the break in a seamless manner (although by two totally different mechanisms). However, there is an error prone NHEJ pathway that results mostly in small deletions or insertions (indels) at the cleavage site. Although this process is a very inefficient one, it is the one that precludes re-cleavage of the target site after DNA repair, single indels being sufficient to totally abolish recognition by the endonuclase. Thus, in the cells treated with the meganuclease before infection, the remaining viral genomes should in principle display a detectable level of such indels.

[0496] We amplified by PCR the HSV2 and HSV4 DNA regions from cells treated with the HSV2 and HSV4 meganucleases before infection (The cell and genomic DNA samples used for the PCR correspond to those used for Q-PCR, FIG. 45), and used deep sequencing to characterize individual PCR products (FIG. 47). In the absence of meganuclease, indels were absent or barely detectable, with no observed events for tHSV4, and 0.05% for tHSV2. However, mutation frequencies increased up to 2.8% in samples transfected with 5 μg of mHSV4 expressing vectors, and 16% in samples treated with 5 μg of mHSV2 expressing vectors. In both cases, deletions largely outnumbered insertions (2.5% of deletions vs. 0.3% of insertions with mHSV4, 15% of deletions and 1% of insertions with mHSV2) and as shown on FIG. 48 and Table XXXVI, there was a strong bias in favor of small deletions. However, deletions of more than 100 bp were detected with mHSV2. Deletions were also mostly small adducts with HSV4, also several large events (40 bp) were observed with HSV4 (FIG. 47).

TABLE XXXVI
Frequencies of deletion/insertion sizes in rHSV-1 genome after exposure
to HSV2 or HSV4 meganuclease

| | | Number of | Number of |
|---|---|---|---|
| | | analyzed PCR | PCR products |
| Target | | product | with mutations (% InDel) |
| tHSV2 | No treatment | 23527 | 12 (0.05%) |
| | mHSV2 treatment | 10356 | 1683 (16%) |
| | | | (deletion event: 15%, |
| | | | insertion event: 1%) |
| tHSV4 | No treatment | 16961 | 0 |
| | mHSV4 treatment | 12228 | 343 (2.8%) |
| | | | (deletion event: 2.5%, |
| | | | insertion event: 0.3%) |

[0497] These results confirm that a very high rate of cleavage occurs at the meganucleases cleavage sites, and are consistent with a mechanism of inhibition based on viral DNA cleavage. It is also no surprise that the most active meganuclease, HSV2, which also gives the highest rates of infection inhibition, is also the one that gives the highest frequency of mutations.

### c) Meganucleases Prevent the Infection of COS-7Cells by a wt HSV-1 Virus

[0498] To further validate the anti-viral potential of the I-CreI variant cleaving the HSV2 target sequence, SCOH-HSV2-M1-MC-80K105A132V (pCLS2459, SEQ ID NO: 256), the ability to prevent infection with a wild type virus was examined. COS-7 cells were infected with wt HSV-1 virus at various MOIs (10⁻³, 10⁻², 10⁻¹, 1) following the same protocol as for rHSV 1, and viral load was monitored by Q-PCR 24 hours post-infection (FIG. 54). Very efficient inhibition could be observed up to an MOI of 1. These results indicate that the HSV2 meganuclease displays a strong anti-viral activity that is not limited to a recombinant HSV-1 virus.

### d) Meganucleases Prevent the Infection of BSR Cells by a wt HSV-1 Virus

[0499] As a complement to the previous analysis, the antiviral potential I-CreI variants cleaving the HSV2, HSV4 and HSV12 target sequences was tested with a wild type virus using an alternative approach. 200,000 BSR cells were seeded in E-well plates, and co-transfected 24 hours later (day 1) with 1.5 μg of meganuclease expressing plasmids and 1.5 μg of a GFP expressing plasmid (pCLS0099). Two days later (day 3), these cells were infected with a wild type virus and viral infection was estimated 8 hours after by immunostaining with an antibody recognizing the gC viral glycoprotein. Since the results obtained with rHSV1 suggested that the HSV2 (SEQ ID NO:256), HSV4 (SEQ ID NO:534) and HSV12 (SEQ ID NO:465) meganucleases had a strong antiviral effect, we raised the virus dose in this experiment, using several MOIs ranging from 0.1 to 8. In order to quantify the antiviral potential of each meganuclease, we monitored the ratio of infected cells among transfected (GFP+) and non transfected (GFP−) cells (FIG. 48). An antiviral index was calculated as the ratio of the infection frequencies in GFP+vs. GFP− cells. In the transfection conditions we used, GFP+ and GFP− cells were both well represented in all experiments, with an average GFP+ cell frequency of 0.63 over 90 transfections (standard deviation: 0.20). Results are summarized in FIG. 48B. A strong inhibitory effect was observed at MOIs of 0.1 and 0.5, with 4 to 7 times less infection among GFP+ cells than among GFP− ones. However, this effect disappeared (compared to negative control) by a MOI of 2. One should note that at low MOI, a small but reproducible effect was observed even with the negative control, suggesting that transfection of a GFP plasmid might have an effect by itself, maybe by transiently disrupting cellular membrane metabolism.

### EXAMPLE 4

### Strategy for Engineering Meganucleases Cleaving Target from the US2 Gene in HSV1 Genome

[0500] HSV1 is a 24 bp (non-palindromic) target (HSV1: AT-GGG-AC-GTC-GTAA-GGG-GG-CCT-GG, SEQ ID NO:23, FIG. 49) present in the US2 gene encoding a possibly HSV-1 envelope-associated protein that interacts with cytokeratin 18. This 1.3 kb gene is present in one copy at position 134053 to 135304 of the US region. The Us2 gene is conserved among alphaherpesviruses, but its function is not known. The Us2 protein is packaged as part of the tegument of mature virions (Clase A C et al, J. Virol. 2003 November; 77(22):12285-98). Within the human cytomegalovirus family, the US2 glycoprotein is involved immune evasion (Besold K et al., Virology. 2009 Aug. 15; 391(1):5-19. Epub 2009 Jun. 30). This gene is considered as non essential for virus replication is cell culture but was considered of interest due to its potential role in virus evasion. The target HSV1 is located from nucleotide 134215 to 134238 (accession number NC_{—}001806; FIG. 1).

I-CreI heterodimers capable of cleaving a target sequence (HSV1: AT-GGG-AC-GTC-GTAA-GGG-GG-CCT-GG, SEQ ID NO:23) were identified using methods derived from those described in Chames et al. (Nucleic Acids Res., 2005, 33, e178), Arnould et al. (J. Mol. Biol., 2006, 355, 443-458), Smith et al. (Nucleic Acids Res., 2006, 34, e149), Arnould et al. (Arnould et al. J Mol. Biol. 2007 371:49-65). These results were then utilized to design single-chain meganucleases directed against the target sequence of SEQ ID NO: 23. These single-chain meganucleases were cloned into mammalian expression vectors and tested for HSV1 cleavage in CHO cells. Strong cleavage activity of the HSV1 target could be observed for these single chain molecules in mammalian cells.

### EXAMPLE 4.1

### Identification of Meganucleases Cleaving HSV1

[0501] I-CreI variants potentially cleaving the HSV1 target sequence in heterodimeric form were constructed by genetic engineering. Pairs of such variants were then co-expressed in yeast. Upon co-expression, one obtains three molecular species, namely two homodimers and one heterodimer. It was then determined whether the heterodimers were capable of cutting the HSV1 target sequence of SEQ ID NO:23.

[0502] a) Construction of Variants of the I-CreI Meganuclease Cleaving Palindromic Sequences Derived from the HSV1 Target Sequence

[0503] The HSV1 sequence is partially a combination of the 10GGG_P (SEQ ID NO: 473), 5GTC_P (SEQ ID NO:474), 10AGG_P (SEQ ID NO: 475) and 5CCC_P (SEQ ID NO: 476), target sequences which are shown on FIG. 49. These sequences are cleaved by meganucleases obtained as described in International PCT applications WO 2006/097784 and WO 2006/097853, Arnould et al. (J. Mol. Biol., 2006, 355, 443-458) and Smith et al. (Nucleic Acids Res., 2006). Thus, HSV1 should be cleaved by combinatorial variants resulting from these previously identified meganucleases.

[0504] The GTAA sequence in −2 to 2 of HSV1 target was first substituted with the GTAC sequence from C1221 (SEQ ID NO:2), resulting in target HSV1.2 (FIG. 49).

[0505] Two palindromic targets, HSV1.3 (and HSV1.5) and HSV1.4 (and HSV1.6), were derived from HSV1 (FIG. 49). Since HSV1.3 and HSV1.4 are palindromic, they should be cleaved by homodimeric proteins. Therefore, homodimeric I-CreI variants cleaving either the HSV1.3 palindromic target sequence of SEQ ID NO:477 or the HSV1.4 palindromic target sequence of SEQ ID NO: 478 were constructed using methods derived from those described in Chames et al. (Nucleic Acids Res., 2005, 33, e178), Arnould et al. (J. Mol. Biol., 2006, 355, 443-458), Smith et al. (Nucleic Acids Res., 2006, 34, e149) and Arnould et al. (Arnould et al. J Mol. Biol. 2007 371:49-65).

[0506] b) Construction of Target Vector

[0507] An oligonucleotide of SEQ ID NO:540, corresponding to the HSV1 target sequence flanked by gateway cloning sequences, was ordered from PROLIGO. This oligo has the following sequence: TGGCATACAAGTTTATGGGACGTCGTAAGGGGGCCTGGCAATCGTCTGTC A. Double-stranded target DNA, generated by PCR amplification of the single stranded oligonucleotide, was cloned into the pCLS1055 yeast reporter vector using the Gateway protocol (INVITROGEN).

[0508] Yeast reporter vector was transformed into the FYBL2-7B Saccharomyces cerevisiae strain having the following genotype: MAT a, ura3Δ851, trp1Δ63, leu2Δ1, lys2Δ202. The resulting strain corresponds to a reporter strain.

[0509] c) Co-Expression of Variants

[0510] The open reading frames coding for the variants cleaving the HSV1.6 (and HSV1.4) or the HSV1.5 (and HSV1.3) sequence were cloned in the pCLS542 expression vector and in the pCLS1107 expression vector, respectively. Yeast DNA from these variants was extracted using standard protocols and was used to transform E. coli. The resulting plasmids were then used to co-transform yeast. Transformants were selected on synthetic medium lacking leucine and containing G418.

[0511] d) Mating of Meganucleases Coexpressing Clones and Screening in Yeast

[0512] Mating was performed using a colony gridder (QpixII, Genetix). Variants were gridded on nylon filters covering YPD plates, using a low gridding density (4-6 spots/cm²). A second gridding process was performed on the same filters to spot a second layer consisting of different reporter-harboring yeast strains for each target. Membranes were placed on solid agar YPD rich medium, and incubated at 30° C. for one night, to allow mating. Next, filters were transferred to synthetic medium, lacking leucine and tryptophan, adding G418, with galactose (2%) as a carbon source, and incubated for five days at 37° C., to select for diploids carrying the expression and target vectors. After 5 days, filters were placed on solid agarose medium with 0.02% X-Gal in 0.5 M sodium phosphate buffer, pH 7.0, 0.1% SDS, 6% dimethyl formamide (DMF), 7 mM β-mercaptoethanol, 1% agarose, and incubated at 37° C., to monitor β-galactosidase activity. Results were analyzed by scanning and quantification was performed using an appropriate software.

[0513] e) Results

[0514] Co-expression of different variants resulted in cleavage of the HSV1 target in 48 tested combinations. Functional combinations are summarized in Table XXXVII herebelow. In this Table, “+” indicates a functional combination on the HSV1 target sequence, i.e., the heterodimer is capable of cleaving the HSV1 target sequence.

TABLE XXXVII

| | | Amino acids positions and residues | | | | | | | |
|---|---|---|---|---|---|---|---|---|---|
| | | of the I-CreI variants cleaving the HSV1.5 (SEQ ID NO: 479) | | | | | | | |
| | | (and.3 (SEQ ID NO: 477)) target | | | | | | | |
| | | | | | | | | | 30R 33G |
| | | | | | | | | 7E 30R | 38T 54L |
| | | 30R 33G | 30R | 28E 33R | | | 30R 33G | 33G 38T | 75N |
| | | 38T 75N | 33G 38T | 38R 40K | 30R 33G | 30R 33G | 38T 54L | 72P 75N | 103S |
| | | 111H | 50R 75N | 75N | 38T 122L | 38T 106P | 75N | 105A | 157G |
| | | (SEQ ID | (SEQ ID | (SEQ ID | (SEQ ID | (SEQ ID | (SEQ ID | (SEQ ID | (SEQ ID |
| | | NO: 541) | NO: 542) | NO: 543) | NO: 544) | NO: 545) | NO: 546) | NO: 547) | NO: 548) |
| Amino acids | 30G 38R 44K | + | + | + | + | + | + | + | + |
| positions and | 70E 75N 96E | | | | | | | | |
| residues of | (SEQ ID | | | | | | | | |
| the I-CreI | NO: 549) | | | | | | | | |
| variants cleaving | 30G 38R 44K | + | + | + | + | + | + | + | + |
| the HSV1.6 | 70D 75N | | | | | | | | |
| (SEQ ID NO: | (SEQ ID | | | | | | | | |
| 480) (and.4 | NO: 550) | | | | | | | | |
| (SEQ ID NO: | 29S 30G 38R | + | + | + | + | + | + | + | + |
| 478)) target | 44K 70D 75N | | | | | | | | |
| | (SEQ ID | | | | | | | | |
| | NO: 551) | | | | | | | | |
| | 9Y 30G 38R | + | + | + | + | + | + | + | + |
| | 44K 70E 75N | | | | | | | | |
| | (SEQ ID | | | | | | | | |
| | NO: 552) | | | | | | | | |
| | 30G 38R 44K | + | + | + | + | + | + | + | + |
| | 70E 75N | | | | | | | | |
| | (SEQ ID | | | | | | | | |
| | NO: 553) | | | | | | | | |
| | 30G 38R 44K | + | + | + | + | + | + | + | + |
| | 57E 70E 75N | | | | | | | | |
| | 108V | | | | | | | | |
| | (SEQ ID | | | | | | | | |
| | NO: 554) | | | | | | | | |

[0515] In conclusion, several heterodimeric I-CreI variants, capable of cleaving the HSV 1 target sequence in yeast, were identified.

### EXAMPLE 4.2

### Covalent Assembly as Single Chain and Improvement of Meganucleases Cleaving HSV1

[0516] I-CreI variants able to efficiently cleave the HSV1 target in yeast when forming heterodimers are described hereabove in Example 4.1. Among them, a couple has been chosen as scaffold for further single chain meganuclease assembly and activity improvement. The screen and validation in CHO cells is a single-strand annealing (SSA) based assay where cleavage of the target by the meganucleases induces homologous recombination and expression of a LagoZ reporter gene (a derivative of the bacterial lacZ gene).

[0517] a) Cloning of HSV1 Target in a Vector for CHO Screen

[0518] An oligonucleotide corresponding to the HSV1 target sequence flanked by gateway cloning sequences, was ordered from PROLIGO (SEQ ID NO:555; TGGCATACAAGTTTATGGGACGTCGTAAGGGGGCCTGGCAATCG TCTGTCA). Double-stranded target DNA, generated by PCR amplification of the single stranded oligonucleotide, was cloned using the Gateway protocol (INVITROGEN) into the pCLS1058 CHO reporter vector. Cloned target was verified by sequencing (MILLEGEN).

[0519] b) Gene Synthesis and Cloning of HSV1 Meganucleases

[0520] The open-reading frames coding for single chain meganuclease variants listed in Table XXXVII were generated by synthetic gene assembly at TOP Gene Technologies, Inc (Montreal, CANADA) and cloned in into the pCLS1853 expression vector using the AscI and XhoI restriction enzymes for internal fragment replacement.

[0521] c) Extrachromosomal Assay in Mammalian Cells

[0522] CHO K1 cells were transfected as described in Example 1.2. 72 hours after transfection, culture medium was removed and 150 μl of lysis/revelation buffer for β-galactosidase liquid assay was added. After incubation at 37° C., OD was measured at 420 nm. The entire process is performed on an automated Velocity11 BioCel platform. Per assay, 150 ng of target vector was cotransfected with an increasing quantity of variant DNA from 0 to 25 ng. The total amount of transfected DNA was completed to 175 ng (target DNA, variant DNA, carrier DNA) using an empty vector (pCLS0002).

[0523] d) Results

[0524] Among the I-CreI variants able to cleave the HSV1 target in yeast when forming heterodimers (in Example 4.1), a couple has been chosen as scaffold for further single chain meganuclease assembly and directed mutagenesis for activity improvement (Table XXXVIII).

TABLE XXXVIII

| HSV1 variant | Amino acids positions and residues of the I-CreI variants |
|---|---|
| HSV1.3-M5 | 30R 33G 38T 106P (SEQ ID NO: 545) |
| HSV1.4-MF | 30G 38R 44K 57E 70E 75N 108V (SEQ ID NO: 554) |

[0525] The HSV1.3-M5×HSV1.4-MF HSV1 heterodimer gives high cleavage activity in yeast. HSV1.3-M5 (SEQ ID NO:545) is a HSV1.5 cutter that bears the following mutations in comparison with the I-CreI wild type sequence: 30R 33G 38T 106P. HSV1.4-MF is a HSV1.6 cutter that bears the following mutations in comparison with the I-CreI wild type sequence: 30G 38R 44K 57E 70E 75N 108V.

[0526] Single chain constructs were engineered using the linker RM2 of SEQ ID NO:464 (AAGGSDKYNQALSKYNQALSKYNQALSGGGGS), thus resulting in the production of the single chain molecule: MA-linkerRM2-M1. During this design step, the G19S mutation was introduced in the C-terminal MF variant. In addition, mutations K7E, K96E were introduced into the M5 variant and mutations E8K, E61R into the MF variant to create the single chain molecule: MA (K7E K96E)-linkerRM2-M1 (E8K E61R G19S) that is further called SCOH-HSV1-M5-MF (SEQ ID NO: 556) scaffold. Some additional amino-acid substitutions have been found in previous studies to enhance the activity of I-CreI derivatives: some of these mutations correspond to the replacement of Glutamic acid 80 with Lysine (E80K), Valine 105 with Alanine (V105A) and Isoleucine 132 with Valine (I132V). The resulting proteins are shown in Table XXXIX below (SEQ ID NO:557-568). All the single chain molecules were assayed in CHO for cleavage of the HSV1 target.

TABLE XXXIX
Example of Single Chain series designed for strong cleavage of HSV1
target in CHO cells

| | | | HSV1 | | SEQ |
|---|---|---|---|---|---|
| | | mutations in | cleavage | | ID |
| plasmid | variant | Single Chain | in CHO | Protein sequence | NO: |
| pCLS2528 | SCOH- | 7E30R33G38T9 | + | MANTKYNEEFLLYLAGFVDGDGSIIAQIKPRQSGKFK | 556 |
| | HSV1-M5- | 6E106P_8K19S | | HTLSLTFQVTQKTQRRWFLDKLVDEIGVGYVRDRGS | |
| | MF | 30G38R44K57E | | VSDYILSEIKPLHNFLTQLQPFLELKQKQANLVPKIIEQ | |
| | | 61R70E75N108 | | LPSAKESPDKFLEVCTWVDQIAALNDSKTRKTTSETV | |
| | | V | | RAVLDSLSEKKKSSPAAGGSDKYNQALSKYNQALSK | |
| | | | | YNQALSGGGGSNKKFLLYLAGFVDSDGSIIAQIKPGQ | |
| | | | | SYKFKHRLSLTFKVTQKTQRRWFLDELVDRIGVGYV | |
| | | | | RDEGSVSNYILSEIKPLHNFLTQLQPFLKLKQKQANL | |
| | | | | VLKVIEQLPSAKESPDKFLEVCTWVDQIAALNDSKTR | |
| | | | | KTTSETVRAVLDSLSEKKKSSP | |
| pCLS2584 | SCOH- | 7E30R33G38T9 | + | MANTKYNEEFLLYLAGFVDGDGSIIAQIKPRQSGKFK | 557 |
| | HSV1-M5- | 6E106P_8K19S | | HTLSLTFQVTQKTQRRWFLDKLVDEIGVGYVRDRGS | |
| | MF-132V | 30G38R44K57E | | VSDYILSEIKPLHNFLTQLQPFLELKQKQANLVPKIIEQ | |
| | | 61R70E75N108 | | LPSAKESPDKFLEVCTWVDQIAALNDSKTRKTTSETV | |
| | | V132V | | RAVLDSLSEKKKSSPAAGGSDKYNQALSKYNQALSK | |
| | | | | YNQALSGGGGSNKKFLLYLAGFVDSDGSIIAQIKPGQ | |
| | | | | SYKFKHRLSLTFKVTQKTQRRWFLDELVDRIGVGYV | |
| | | | | RDEGSVSNYILSEIKPLHNFLTQLQPFLKLKQKQANL | |
| | | | | VLKVIEQLPSAKESPDKFLEVCTWVDQVAALNDSKT | |
| | | | | RKTTSETVRAVLDSLSEKKKSSP | |
| pCLS2585 | SCOH- | 7E30R33G38T9 | + | MANTKYNEEFLLYLAGFVDGDGSIIAQIKPRQSGKFK | 558 |
| | HSV1-M5- | 6E106P_8K19S | | HTLSLTFQVTQKTQRRWFLDKLVDEIGVGYVRDRGS | |
| | MF- | 30G38R44K57E | | VSDYILSEIKPLHNFLTQLQPFLELKQKQANLVPKIIEQ | |
| | 80K105A | 61R70E75N80K | | LPSAKESPDKFLEVCTWVDQIAALNDSKTRKTTSETV | |
| | | 105A108V | | RAVLDSLSEKKKSSPAAGGSDKYNQALSKYNQALSK | |
| | | | | YNQALSGGGGSNKKFLLYLAGFVDSDGSIIAQIKPGQ | |
| | | | | SYKFKHRLSLTFKVTQKTQRRWFLDELVDRIGVGYV | |
| | | | | RDEGSVSNYILSKIKPLHNFLTQLQPFLKLKQKQANL | |
| | | | | ALKVIEQLPSAKESPDKFLEVCTWVDQIAALNDSKTR | |
| | | | | KTTSETVRAVLDSLSEKKKSSP | |
| pCLS2586 | SCOH- | 7E30R33G38T9 | + | MANTKYNEEFLLYLAGFVDGDGSIIAQIKPRQSGKFK | 559 |
| | HSV1-M5- | 6E106P_8K19S | | HTLSLTFQVTQKTQRRWFLDKLVDEIGVGYVRDRGS | |
| | MF- | 30G38R44K57E | | VSDYILSEIKPLHNFLTQLQPFLELKQKQANLVPKIIEQ | |
| | 80K132V | 61R70E75N80K | | LPSAKESPDKFLEVCTWVDQIAALNDSKTRKTTSETV | |
| | | 108V132V | | RAVLDSLSEKKKSSPAAGGSDKYNQALSKYNQALSK | |
| | | | | YNQALSGGGGSNKKFLLYLAGFVDSDGSIIAQIKPGQ | |
| | | | | SYKFKHRLSLTFKVTQKTQRRWFLDELVDRIGVGYV | |
| | | | | RDEGSVSNYILSKIKPLHNFLTQLQPFLKLKQKQANL | |
| | | | | VLKVIEQLPSAKESPDKFLEVCTWVDQVAALNDSKT | |
| | | | | RKTTSETVRAVLDSLSEKKKSSP | |
| pCLS2587 | SCOH- | 7E30R33G38T9 | + | MANTKYNEEFLLYLAGFVDGDGSIIAQIKPRQSGKFK | 560 |
| | HSV1-M5- | 6E106P_8K19S | | HTLSLTFQVTQKTQRRWFLDKLVDEIGVGYVRDRGS | |
| | MF- | 30G38R44K57E | | VSDYILSEIKPLHNFLTQLQPFLELKQKQANLVPKIIEQ | |
| | 80K105A | 61R70E75N80K | | LPSAKESPDKFLEVCTWVDQIAALNDSKTRKTTSETV | |
| | 132V | 105A108V132V | | RAVLDSLSEKKKSSPAAGGSDKYNQALSKYNQALSK | |
| | | | | YNQALSGGGGSNKKFLLYLAGFVDSDGSIIAQIKPGQ | |
| | | | | SYKFKHRLSLTFKVTQKTQRRWFLDELVDRIGVGYV | |
| | | | | RDEGSVSNYILSKIKPLHNFLTQLQPFLKLKQKQANL | |
| | | | | ALKVIEQLPSAKESPDKFLEVCTWVDQVAALNDSKT | |
| | | | | RKTTSETVRAVLDSLSEKKKSSP | |
| pCLS2588 | SCOH- | 7E30R33G38T9 | + | MANTKYNEEFLLYLAGFVDGDGSIIAQIKPRQSGKFK | 561 |
| | HSV1-M5- | 6E106P132V_8 | | HTLSLTFQVTQKTQRRWFLDKLVDEIGVGYVRDRGS | |
| | 132V-MF | K19S30G38R44 | | VSDYILSEIKPLHNFLTQLQPFLELKQKQANLVPKIIEQ | |
| | | K57E61R70E75 | | LPSAKESPDKFLEVCTVVVDQVAALNDSKTRKTTSET | |
| | | N108V | | VRAVLDSLSEKKKSSPAAGGSDKYNQALSKYNQALS | |
| | | | | KYNQALSGGGGSNKKFLLYLAGFVDSDGSIIAQIKPG | |
| | | | | QSYKFKHRLSLTFKVTQKTQRRWFLDELVDRIGVGY | |
| | | | | VRDEGSVSNYILSEIKPLHNFLTQLQPFLKLKQKQAN | |
| | | | | LVLKVIEQLPSAKESPDKFLEVCTWVDQIAALNDSKT | |
| | | | | RKTTSETVRAVLDSLSEKKKSSP | |
| pCLS2589 | SCOH- | 7E30R33G38T9 | + | MANTKYNEEFLLYLAGFVDGDGSIIAQIKPRQSGKFK | 562 |
| | HSV1-M5- | 6E106P132V_8 | | HTLSLTFQVTQKTQRRWFLDKLVDEIGVGYVRDRGS | |
| | 132V-MF- | K19S30G38R44 | | VSDYILSEIKPLHNFLTQLQPFLELKQKQANLVPKIIEQ | |
| | 132V | K57E61R70E75 | | LPSAKESPDKFLEVCTWVDQVAALNDSKTRKTTSET | |
| | | N108V132V | | VRAVLDSLSEKKKSSPAAGGSDKYNQALSKYNQALS | |
| | | | | KYNQALSGGGGSNKKFLLYLAGFVDSDGSIIAQIKPG | |
| | | | | QSYKFKHRLSLTFKVTQKTQRRWFLDELVDRIGVGY | |
| | | | | VRDEGSVSNYILSEIKPLHNFLTQLQPFLKLKQKQAN | |
| | | | | LVLKVIEQLPSAKESPDKFLEVCTWVDQVAALNDSKT | |
| | | | | RKTTSETVRAVLDSLSEKKKSSP | |
| pCLS2593 | SCOH- | 7E30R33G38T8 | + | MANTKYNEEFLLYLAGFVDGDGSIIAQIKPRQSGKFK | 563 |
| | HSV1-M5- | 0K96E105A106 | | HTLSLTFQVTQKTQRRWFLDKLVDEIGVGYVRDRGS | |
| | 80K105A- | P_8K19S30G38 | | VSDYILSKIKPLHNFLTQLQPFLELKQKQANLAPKIIEQ | |
| | MF | R44K57E61R70 | | LPSAKESPDKFLEVCTWVDQIAALNDSKTRKTTSETV | |
| | | E75N108V | | RAVLDSLSEKKKSSPAAGGSDKYNQALSKYNQALSK | |
| | | | | YNQALSGGGGSNKKFLLYLAGFVDSDGSIIAQIKPGQ | |
| | | | | SYKFKHRLSLTFKVTQKTQRRWFLIDELVDRIGVGYV | |
| | | | | RDEGSVSNYILSEIKPLHNFLTQLQPFLKLKQKQANL | |
| | | | | VLKVIEQLPSAKESPDKFLEVCTWVDQIAALNDSKTR | |
| | | | | KTTSETVRAVLDSLSEKKKSSP | |
| pCLS2597 | SCOH- | 7E30R33G38T8 | + | MANTKYNEEFLLYLAGFVDGDGSIIAQIKPRQSGKFK | 564 |
| | HSV1-M5- | 0K96E106P132 | | HTLSLTFQVTQKTQRRWFLDKLVDEIGVGYVRDRGS | |
| | 80K132V- | V_8K19S30G38 | | VSDYILSKIKPLHNFLTQLQPFLELKQKQANLVPKIIEQ | |
| | MF | R44K57E61R70 | | LPSAKESPDKFLEVCTWVDQVAALNDSKTRKTTSET | |
| | | E75N108V | | VRAVLDSLSEKKKSSPAAGGSDKYNQALSKYNQALS | |
| | | | | KYNQALSGGGGSNKKFLLYLAGFVDSDGSIIAQIKPG | |
| | | | | QSYKFKHRLSLTFKVTQKTQRRWFLDELVDRIGVGY | |
| | | | | VRDEGSVSNYILSEIKPLHNFLTQLQPFLKLKQKQAN | |
| | | | | LVLKVIEQLPSAKESPDKFLEVCTWVDQIAALNDSKT | |
| | | | | RKTTSETVRAVLDSLSEKKKSSP | |
| pCLS2598 | SCOH- | 7E30R33G38T8 | + | MANTKYNEEFLLYLAGFVDGDGSIIAQIKPRQSGKFK | 565 |
| | HSV1-M5- | 0K96E106P132 | | HTLSLTFQVTQKTQRRWFLDKLVDEIGVGYVRDRGS | |
| | 80K132V- | V_8K19S30G38 | | VSDYILSKIKPLHNFLTQLQPFLELKQKQANLVPKIIEQ | |
| | MF-105A | R44K57E61R70 | | LPSAKESPDKFLEVCTWVDQVAALNDSKTRKTTSET | |
| | | E75N105A108V | | VRAVLDSLSEKKKSSPAAGGSDKYNQALSKYNQALS | |
| | | | | KYNQALSGGGGSNKKFLLYLAGFVDSDGSIIAQIKPG | |
| | | | | QSYKFKHRLSLTFKVTQKTQRRWFLDELVDRIGVGY | |
| | | | | VRDEGSVSNYILSEIKPLHNFLTQLQPFLKLKQKQAN | |
| | | | | LALKVIEQLPSAKESPDKFLEVCTWVDQIAALNDSKT | |
| | | | | RKTTSETVRAVLDSLSEKKKSSP | |
| pCLS2599 | SCOH- | 7E30R33G38T8 | + | MANTKYNEEFLLYLAGFVDGDGSIIAQIKPRQSGKFK | 566 |
| | HSV1-M5- | 0K96E106P132 | | HTLSLTFQVTQKTQRRWFLDKLVDEIGVGYVRDRGS | |
| | 80K132V- | V_8K19S30G38 | | VSDYILSKIKPLHNFLTQLQPFLELKQKQANLVPKIIEQ | |
| | MF-132V | R44K57E61R70 | | LPSAKESPDKFLEVCTWVDQVAALNDSKTRKTTSET | |
| | | E75N108V132V | | VRAVLDSLSEKKKSSPAAGGSDKYNQALSKYNQALS | |
| | | | | KYNQALSGGGGSNKKFLLYLAGFVDSDGSIIAQIKPG | |
| | | | | QSYKFKHRLSLTFKVTQKTQRRWFLDELVDRIGVGY | |
| | | | | VRDEGSVSNYILSEIKPLHNFLTQLQPFLKLKQKQAN | |
| | | | | LVLKVIEQLPSAKESPDKFLEVCTWVDQVAALNDSKT | |
| | | | | RKTTSETVRAVLDSLSEKKKSSP | |
| pCLS2600 | SCOH- | 7E30R33G38T8 | + | MANTKYNEEFLLYLAGFVDGDGSIIAQIKPRQSGKFK | 567 |
| | HSV1-M5- | 0K96E106P132 | | HTLSLTFQVTQKTQRRWFLDKLVDEIGVGYVRDRGS | |
| | 80K132V- | V_8K19S30G38 | | VSDYILSKIKPLHNFLTQLQPFLELKQKQANLVPKIIEQ | |
| | MF- | R44K57E61R70 | | LPSAKESPDKFLEVCTWVDQVAALNDSKTRKTTSET | |
| | 80K105A | E75N80K105A1 | | VRAVLDSLSEKKKSSPAAGGSOKYNQALSKYNQALS | |
| | | 08V | | KYNQALSGGGGSNKKFLLYLAGFVDSDGSIIAQIKPG | |
| | | | | QSYKFKHRLSLTFKVTQKTQRRWFLDELVDRIGVGY | |
| | | | | VRDEGSVSNYILSKIKPLHNFLTQLQPFLKLKQKQAN | |
| | | | | LALKVIEQLPSAKESPDKFLEVCTWVDQIAALNDSKT | |
| | | | | RKTTSETVRAVLDSLSEKKKSSP | |
| pCLS4379 | SCOH- | 7E30R33G38T9 | + | MANTKYNEEFLLYLAGFVDGDGSIIAQIKPRQSGKFK | 568 |
| | HSV1-M5- | 6E106P132V_8 | | HTLSLTFQVTQKTQRRWFLDKLVDEIGVGYVRDRGS | |
| | MFrev | K19530G38R44 | | VSDYILSEIKPLHNFLTQLQPFLELKQKQANLVPKIIEQ | |
| | | K57E61R108V | | LPSAKESPDKFLEVCTWVDQVAALNDSKTRKTTSET | |
| | | | | VRAVLDSLSEKKKSSPAAGGSDKYNQALSKYNQALS | |
| | | | | KYNQALSGGGGSNKKFLLYLAGFVDSDGSIIAQIKPG | |
| | | | | QSYKFKHRLSLTFKVTQKTQRRWFLDELVDRIGVGY | |
| | | | | VRDRGSVSDYILSEIKPLHNFLTQLQPFLKLKQKQAN | |
| | | | | LVLKVIEQLPSAKESPDKFLEVCTWVDQIAALNDSKT | |
| | | | | RKTTSETVRAVLDSLSEKKKSSP | |

[0527] d) Results

[0528] The activity of the single chain molecules against the HSV1 target (SEQ ID NO:23) was monitored using the previously described CHO assay along with our internal control SCOH-RAG and I-Sce I meganucleases. All comparisons were done upon DNA dose response of transfected variant DNA. All the single molecules displayed HSV1 target cleavage activity in CHO assay as listed in Table XXXIX. Variants shared specific behaviour upon assayed dose depending on the mutation profile they bear. For Example, pCLS2588 expressing the SCOH-HSV1-M5-132V-MF (SEQ ID NO:557) has a similar profile than I-Sce I (FIG. 42). Its activity increases with the quantity of tranfected DNA. With pCLS4379, expressing SCOH-HSV1-M5-MFrev (SEQ ID NO:568), the global activity can be increased. All of the variants described are active and can be used for the HSV-1 virus US2 gene targeting and cleavage.

### EXAMPLE 5

### Strategy for Engineering Meganucleases Cleaving Target from the UL30 Gene in HSV1 Genome

[0529] I-CreI heterodimers capable of cleaving a target sequence (HSV8: CC-GCT-CT-GTT-TTAC-CGC-GT-CTA-CG, SEQ ID NO:481) were identified using methods derived from those described in Chames et al. (Nucleic Acids Res., 2005, 33, e178), Arnould et al. (J. Mol. Biol., 2006, 355, 443-458), Smith et al. (Nucleic Acids Res., 2006, 34, e149), Arnould et al. (Arnould et al. J Mol. Biol. 2007 371:49-65). These results were then utilized to design single-chain meganucleases directed against the target sequence of SEQ ID NO:481. These single-chain meganucleases were cloned into mammalian expression vectors and tested for HSV8 cleavage in CHO cells. Strong cleavage activity of the HSV8 target could be observed for these single chain molecules in mammalian cells.

### EXAMPLE 5.1

### Identification of Meganucleases Cleaving HSV8

[0530] I-CreI variants potentially cleaving the HSV8 target sequence in heterodimeric form were constructed by genetic engineering. Pairs of such variants were then co-expressed in yeast. Upon co-expression, one obtains three molecular species, namely two homodimers and one heterodimer. It was then determined whether the heterodimers were capable of cutting the HSV8 target sequence of SEQ ID NO:481.

[0531] a) Construction of Variants of the I-CreI Meganuclease Cleaving Palindromic Sequences Derived from the HSV8 Target Sequence

[0532] The HSV8 target sequence is partially a combination of the 10GCT_P (SEQ ID NO:483), 5GTT_P (SEQ ID NO:484), 10TAG_P (SEQ ID NO:485), SGCG_P (SEQ ID NO:486) target sequences which are shown on FIG. 50. These sequences are cleaved by meganucleases obtained as described in International PCT applications WO 2006/097784 and WO 2006/097853, Arnould et al. (J. Mol. Biol., 2006, 355, 443-458) and Smith et al. (Nucleic Acids Res., 2006). Thus, HSV8 should be cleaved by combinatorial variants resulting from these previously identified meganucleases.

[0533] The TTAC sequence of HSV8 target in −2 to 2 was first substituted with the GTAC sequence from C1221, resulting in target HSV8.2 (FIG. 50).

[0534] Two palindromic targets, HSV8.3 (and HSV8.5) and HSV8.4 (and HSV8.6), were derived from HSV8 (FIG. 50). Since HSV8.3 and HSV8.4 are palindromic, they should be cleaved by homodimeric proteins. Therefore, homodimeric I-CreI variants cleaving either the HSV8.3 palindromic target sequence of SEQ ID NO:487 or the HSV8.4 palindromic target sequence of SEQ ID NO:488 were constructed using methods derived from those described in Chames et al. (Nucleic Acids Res., 2005, 33, e178), Arnould et al. (J. Mol. Biol., 2006, 355, 443-458), Smith et al. (Nucleic Acids Res., 2006, 34, e149) and Arnould et al. (Arnould et al. J Mol. Biol. 2007 371:49-65).

[0535] b) Construction of Target Vector

[0536] An oligonucleotide of SEQ ID NO:569, corresponding to the HSV8 target sequence flanked by gateway cloning sequences, was ordered from PROLIGO. This oligo has the following sequence: TGGCATACAAGTTTCCGCTCTGTTTTA CCGCGTCTACGCAATCGTCTGTCA. Double-stranded target DNA, generated by PCR amplification of the single stranded oligonucleotide, was cloned into the pCLS1055 yeast reporter vector using the Gateway protocol (INVITROGEN).

[0537] Yeast reporter vector was transformed into the FYBL2-7B Saccharomyces cerevisiae strain having the following genotype: MAT a, ura3Δ851, trp1Δ63, leu2Δ1, lys2Δ202. The resulting strain corresponds to a reporter strain.

[0538] c) Co-Expression of Variants

[0539] The open reading frames coding for the variants cleaving the HSV8.6 (and HSV8.4) or the HSV8.5 (and HSV8.3) sequence were cloned in the pCLS542 expression vector and in the pCLS1107 expression vector, respectively. Yeast DNA from these variants was extracted using standard protocols and was used to transform E. coli. The resulting plasmids were then used to co-transform yeast. Transformants were selected on synthetic medium lacking leucine and containing G418.

[0540] d) Mating of Meganucleases Coexpressing Clones and Screening in Yeast

[0541] Mating was performed using a colony gridder (QpixII, Genetix). Variants were gridded on nylon filters covering YPD plates, using a low gridding density (4-6 spots/cm²). A second gridding process was performed on the same filters to spot a second layer consisting of different reporter-harboring yeast strains for each target. Membranes were placed on solid agar YPD rich medium, and incubated at 30° C. for one night, to allow mating. Next, filters were transferred to synthetic medium, lacking leucine and tryptophan, adding G418, with galactose (2%) as a carbon source, and incubated for five days at 37° C., to select for diploids carrying the expression and target vectors. After 5 days, filters were placed on solid agarose medium with 0.02% X-Gal in 0.5 M sodium phosphate buffer, pH 7.0, 0.1% SDS, 6% dimethyl formamide (DMF), 7 mM β-mercaptoethanol, 1% agarose, and incubated at 37° C., to monitor β-galactosidase activity. Results were analyzed by scanning and quantification was performed using an appropriate software.

[0542] e) Results

[0543] Co-expression of different variants resulted in cleavage of the HSV8 target in 28 tested combinations. Functional combinations are summarized in Table XXXX here below. In this Table, “+” indicates a functional combination on the HSV8 target sequence, i.e., the heterodimer is capable of cleaving the HSV8 target sequence. “nd” indicates a lack of yeast transformant after co-transformation of HSV8.5 and HSV8.6 variants.

[0544] HSV8 target is recognized and cleaved by the meganucleases shown in Table XXXX below.

TABLE XXXX

Amino acids positions and residues
of the I-CreI variants cleaving the HSV8.5 (SEQ ID NO: 489)
(and.3 (SEQ ID NO: 487)) target

| | | 30K33A7 | 30K33T7 | 33H38Y7 | 30H33S70S7 | 30K33C44L70 | 30K33R70S7 |
|---|---|---|---|---|---|---|---|
| | | 0S75H77Y | 0S75H77Y | 0S75H77Y | 5H77Y | N75N80K | 5H77Y |
| | | (SEQ ID | (SEQ ID | (SEQ ID | (SEQ ID | (SEQ ID | (SEQ ID |
| | | NO: 511) | NO: 512) | NO: 513) | NO: 514) | NO: 515) | NO: 516) |
| Amino acids | 32H 33C 40A | + | + | + | + | + | + |
| positions and | 70S 75N 77K | | | | | | |
| residues of the | (SEQ ID | | | | | | |
| I-CreI variants | NO: 517) | | | | | | |
| cleaving the HSV8.6 | 32H 33C 44R | + | + | + | + | nd | + |
| (SEQ ID NO: | 68Y 70S 75Y | | | | | | |
| 490) (and.4 | 77N | | | | | | |
| (SEQ ID NO: | (SEQ ID | | | | | | |
| 488)) target | NO: 518) | | | | | | |
| | 32H 33C 40A | + | + | + | + | + | + |
| | 44R 68Y 70S | | | | | | |
| | 75Y 77N | | | | | | |
| | (SEQ ID | | | | | | |
| | NO: 519) | | | | | | |
| | 30H 32T 33C | + | + | + | + | + | + |
| | 44R 68Y 70S | | | | | | |
| | 75Y 77N | | | | | | |
| | (SEQ ID | | | | | | |
| | NO: 520) | | | | | | |
| | 32N 33C 70S | + | + | + | + | nd | + |
| | 75N 77K | | | | | | |
| | (SEQ ID | | | | | | |
| | NO: 521) | | | | | | |

[0545] In conclusion, several heterodimeric I-CreI variants, capable of cleaving the HSV8 target sequence in yeast, were identified.

### EXAMPLE 5.2

### Covalent Assembly as Single Chain and Improvement of Meganucleases Cleaving HSV8

[0546] I-CreI variants able to efficiently cleave the HSV8 target in yeast when forming heterodimers are described hereabove in Example 5.1. Among them, three couples have been chosen as scaffold for further single chain meganuclease assembly and activity improvement. The screen and validation in CHO cells is a single-strand annealing (SSA) based assay where cleavage of the target by the meganucleases induces homologous recombination and expression of a LagoZ reporter gene (a derivative of the bacterial lacZ gene).

[0547] a) Cloning of HSV8 Target in a Vector for CHO Screen

[0548] An oligonucleotide corresponding to the HSV8 target sequence flanked by gateway cloning sequences, was ordered from PROLIGO (SEQ ID NO:570; TGGCATACAAGTTTCCGCTCTGTTTTACCGCGTCTACGCAATCGT CTGTCA). Double-stranded target DNA, generated by PCR amplification of the single stranded oligonucleotide, was cloned using the Gateway protocol (INVITROGEN) into the pCLS1058 CHO reporter vector. Cloned target was verified by sequencing (MILLEGEN).

[0549] b) Gene Synthesis and Cloning of HSV8 Meganucleases

[0550] The open-reading frames coding for single chain meganuclease variants listed in Table XXXXII were generated by synthetic gene assembly at MWG-EUROFINS (Les Ulis, France) and cloned into the pCLS1853 expression vector using the AscI and XhoI restriction enzymes for internal fragment replacement.

[0551] c) Extrachromosomal Assay in Mammalian Cells

[0552] CHO K1 cells were transfected as described in Example 1.2. 72 hours after transfection, culture medium was removed and 150 μl of lysis/revelation buffer for β-galactosidase liquid assay was added. After incubation at 37° C., OD was measured at 420 nm. The entire process is performed on an automated Velocity11 BioCel platform. Per assay, 150 ng of target vector was cotransfected with an increasing quantity of variant DNA from 0 to 25 ng. The total amount of transfected DNA was completed to 175 ng (target DNA, variant DNA, carrier DNA) using an empty vector (pCLS0002).

[0553] d) Results

[0554] Among the I-CreI variants able to cleave the HSV8 target in yeast when forming heterodimers (in Example 5.1), three couples have been chosen as scaffolds for further single chain meganuclease assembly and directed mutagenesis for activity improvement (Table XXXXI).

TABLE XXXXI

| | Amino acids positions | Amino acids positions |
|---|---|---|
| | and residues of the I-CreI | and residues of the |
| | variants cleaving | I-CreI variants cleaving |
| HSV8 couple | HSV8.5 (and .3) | HSV8.6 (and .4) |
| HSV8 b1 | 33H 38Y 70S 75H 77Y | 32H 33C 40A 70S 75N 77K |
| | (SEQ ID NO: 513) | (SEQ ID NO: 517) |
| HSV8 b56 | 30K 33A 70S 75H 77Y | 32H 33C 40A 70S 75N 77K |
| | (SEQ ID NO: 511) | (SEQ ID NO: 517) |
| HSV8 bu | 30K 33R 70S 75H 77Y | 32H 33C 40A 44R 68Y 70S |
| | (SEQ ID NO: 516) | 75Y 77N (SEQ ID NO: 519) |

[0555] The three HSV8 b1, b56, bu heterodimers give high cleavage activity in yeast. HSV8 b1 is a couple of HSV8.5×HSV8.6 cutters that bear the following mutations in comparison with the I-CreI wild type sequence: 33H 38Y 70S 75H 77Y (HSV8.5) (SEQ ID NO:513)×32H 33C 40A 70S 75N 77K (HSV8.6) (SEQ ID NO:517). HSV8 b56 is a couple of HSV8.5×HSV8.6 cutters that bear the following mutations in comparison with the I-CreI wild type sequence: 30K 33A 70S 75H 77Y (HSV8.5)×32H 33C 40A 70S 75N 77K (HSV8.6). HSV8 bu is a couple of HSV8.5×HSV8.6 cutters that bear the following mutations in comparison with the I-CreI wild type sequence: 30K 33R 70S 75H 77Y (HSV8.5)×32H 33C 40A 44R 68Y 70S 75Y 77N(HSV8.6).

[0556] Single chain constructs were engineered using the linker RM2 of SEQ ID NO 464 (AAGGSDKYNQALSKYNQALSKYNQALSGGGGS), thus resulting in the production of the single chain molecule: HSV8.5 variant-linkerRM2-HSV8.6 variant. During this design step, the G19S mutation was introduced in the C-terminal HSV8.6 variant. In addition, mutations K7E, K96E were introduced into the HSV8.5 variant and mutations E8K, E61R into the HSV8.6 variant to create the single chain molecule: HSV8.5-variant (K7E K96E)-linkerRM2-HSV8.6-variant (E8K E61R G19S) that is further called SCOH-HSV8b1, SCOH-HSV8b56 and SCOH-HSV8bu depending on the HSV8 couple used as scaffold (Tables XXXXI and XXXXII). Some additional amino-acid substitutions have been found in previous studies to enhance the activity of I-CreI derivatives: some of these mutations correspond to the replacement of Glutamic acid 80 with Lysine (E80K), Valine 105 with Alanine (V105A) and Isoleucine 132 with Valine (I132V). The resulting proteins are shown in Table XXXXII below. All the single chain molecules were assayed in CHO for cleavage of the HSV8 target.

TABLE XXXXII
Example of Single Chain series designed for strong
cleavage of HSV8 target in CHO cells

| | | | HSV8 | | SEQ |
|---|---|---|---|---|---|
| | | mutations in | cleavage | | ID |
| plasmid | variant | Single Chain | in CHO | Protein sequence | NO: |
| pCLS3301 | SCOH- | 7E33H38Y70S | + | MANTKYNEEFLLYLAGFVDGDGSIIAQIKPNQSHKFKHY | 571 |
| | HSV8b | 75H77Y96E_8 | | LSLTFQVTQKTQRRWFLDKLVDEIGVGYVRDSGSVSHY | |
| | 1-A | K19S32H33C4 | | YLSEIKPLHNFLTQLQPFLELKQKQANLVLKIIEQLPSAK | |
| | | 0A61R70S75N | | ESPDKFLEVCTWVDQIAALNDSKTRKTTSETVRAVLDSL | |
| | | 77K | | SEKKKSSPAAGGSDKYNQALSKYNQALSKYNQALSGG | |
| | | | | GGSNKKFLLYLAGFVDSDGSIIAQIKPNQHCKFKHQLAL | |
| | | | | TFQVTQKTQRRWFLDKLVDRIGVGYVRDSGSVSNYKL | |
| | | | | SEIKPLHNFLTQLQPFLKLKQKQANLVLKIIEQLPSAKES | |
| | | | | PDKFLEVCTWVDQIAALNDSKTRKTTSETVRAVLDSLSE | |
| | | | | KKKSSP | |
| pCLS3302 | SCOH- | 7E33H38Y70S | + | MANTKYNEEFLLYLAGFVDGDGSIIAQIKPNQSHKFKHY | 572 |
| | HSV8b | 75H77Y96E13 | | LSLTFQVTQKTQRRWFLDKLVDEIGVGYVRDSGSVSHY | |
| | 1-B | 2V_8K19S32H | | YLSEIKPLHNFLTQLQPFLELKQKQANLVLKIIEQLPSAK | |
| | | 33C40A61R70 | | ESPDKFLEVCTWVDQVAALNDSKTRKTTSETVRAVLDS | |
| | | S75N77K132V | | LSEKKKSSPAAGGSDKYNQALSKYNQALSKYNQALSG | |
| | | | | GGGSNKKFLLYLAGFVDSDGSIIAQIKPNQHCKFKHQLA | |
| | | | | LTFQVTQKTQRRWFLDKLVDRIGVGYVRDSGSVSNYKL | |
| | | | | SEIKPLHNFLTQLQPFLKLKQKQANLVLKIIEQLPSAKES | |
| | | | | PDKFLEVCTWVDQVAALNDSKTRKTTSETVRAVLDSLS | |
| | | | | EKKKSSP | |
| pCLS3303 | SCOH- | 7E33H38Y70S | + | MANTKYNEEFLLYLAGFVDGDGSIIAQIKPNQSHKFKHY | 573 |
| | HSV8b | 75H77Y80K96 | | LSLTFQVTQKTQRRWFLDKLVDEIGVGYVRDSGSVSHY | |
| | 1-C | E132V_8K19S | | YLSKIKPLHNFLTQLOPFLELKQKQANLVLKIIEQLPSAK | |
| | | 32H33C40A61 | | ESPDKFLEVCTWVDQVAALNDSKTRKTTSETVRAVLDS | |
| | | R70S75N77K1 | | LSEKKKSSPAAGGSDKYNQALSKYNQALSKYNQALSG | |
| | | 05A132V | | GGGSNKKFLLYLAGFVDSDGSIIAQIKPNQHCKFKHQLA | |
| | | | | LTFQVTQKTQRRWFLDKLVDRIGVGYVRDSGSVSNYKL | |
| | | | | SEIKPLHNFLTQLQPFLKLKQKQANLALKIIEQLPSAKES | |
| | | | | PDKFLEVCTWVDQVAALNDSKTRKTTSETVRAVLDSLS | |
| | | | | EKKKSSP | |
| | SCOH- | 7E33H38Y70S | + | MANTKYNEEFLLYLAGFVDGDGSIIAQIKPNQSHKFKHY | 574 |
| pCLS3304 | HSV8b | 75H77Y80K96 | | LSLTFQVTQKTQRRWFLDKLVDEIGVGYVRDSGSVSHY | |
| | 1-E | E105A132V_8 | | YLSKIKPLHNFLTQLQPFLELKQKQANLALKIIEQLPSAK | |
| | | K19S32H33C4 | | ESPDKFLEVCTWVDQVAALNDSKTRKTTSETVRAVLDS | |
| | | 0A61R70S75N | | LSEKKKSSPAAGGSDKYNQALSKYNQALSKYNQALSG | |
| | | 77K80K105A1 | | GGGSNKKFLLYLAGFVDSDGSIIAQIKPNQHCKFKHQLA | |
| | | 32V | | LTFQVTQKTQRRWFLDKLVDRIGVGYVRDSGSVSNYKL | |
| | | | | SKIKPLHNFLTQLQPFLKLKQKQANLALKIIEQLPSAKES | |
| | | | | PDKFLEVCTWVDQVAALNDSKTRKTTSETVRAVLDSLS | |
| | | | | EKKKSSP | |
| pCLS3305 | SCOH- | 7E30K33A70S | + | MANTKYNEEFLLYLAGFVDGDGSIIAQIKPKQSAKFKHQ | 575 |
| | HSV8b | 75H77Y96E_8 | | LSLTFQVTQKTQRRWFLDKLVDEIGVGYVRDSGSVSHY | |
| | 562-A | K19S32H33C4 | | YLSEIKPLHNFLTQLQPFLELKQKQANLVLKIIEQLPSAK | |
| | | 0A61R70S75N | | ESPDKFLEVCTWVDQIAALNDSKTRKTTSETVRAVLDSL | |
| | | 77K | | SEKKKSSPAAGGSDKYNQALSKYNQALSKYNQALSGG | |
| | | | | GGSNKKFLLYLAGFVDSDGSIIAQIKPNQHCKFKHQLAL | |
| | | | | TFQVTQKTQRRWFLDKLVDRIGVGYVRDSGSVSNYKL | |
| | | | | SEIKPLHNFLTQLQPFLKLKQKQANLVLKIIEQLPSAKES | |
| | | | | PDKFLEVCTWVDQIAALNDSKTRKTTSETVRAVLDSLSE | |
| | | | | KKKSSP | |
| pCLS3306 | SCOH- | 7E30K33A70S | + | MANTKYNEEFLLYLAGFVDGDGSIIAQIKPKQSAKFKHQ | 576 |
| | HSV8b | 75H77Y96E13 | | LSLTFQVTQKTQRRWFLDKLVDEIGVGYVRDSGSVSHY | |
| | 562-B | 2V_8K19S32H | | YLSEIKPLHNFLTQLQPFLELKQKQANLVLKIIEQLPSAK | |
| | | 33C40A61R70 | | ESPDKFLEVCTWVDQVAALNDSKTRKTTSETVRAVLDS | |
| | | S75N77K132V | | LSEKKKSSPAAGGSDKYNQALSKYNQALSKYNQALSG | |
| | | | | GGGSNKKFLLYLAGFVDSDGSIIAQIKPNQHCKFKHQLA | |
| | | | | LTFQVTQKTQRRWFLDKLVDRIGVGYVRDSGSVSNYKL | |
| | | | | SEIKPLHNFLTQLQPFLKLKQKQANLVLKIIEQLPSAKES | |
| | | | | PDKFLEVCTWVDQVAALNDSKTRKTTSETVRAVLDSLS | |
| | | | | EKKKSSP | |
| pCLS3307 | SCOH- | 7E30K33A70S | + | MANTKYNEEFLLYLAGFVDGDGSIIAQIKPKQSAKFKHQ | 577 |
| | HSV8b | 75H77Y80K96 | | LSLTFQVTQKTQRRWFLDKLVDEIGVGYVRDSGSVSHY | |
| | 562-C | E132V_8K198 | | YLSKIKPLHNFLTQLQPFLELKQKQANLVLKIIEQLPSAK | |
| | | 32H33C40A61 | | ESPDKFLEVCTWVDQVAALNDSKTRKTTSETVRAVLDS | |
| | | R70S75N77K1 | | LSEKKKSSPAAGGSDKYNQALSKYNQALSKYNQALSG | |
| | | 05A132V | | GGGSNKKFLLYLAGFVDSDGSIIAQIKPNQHCKFKHQLA | |
| | | | | LTFQVTQKTQRRWFLOKLVDRIGVGYVRDSGSVSNYKL | |
| | | | | SEIKPLHNFLTQLQPFLKLKQKQANLALKIIEQLPSAKES | |
| | | | | PDKFLEVCTWVDQVAALNDSKTRKTTSETVRAVLDSLS | |
| | | | | EKKKSSP | |
| pCLS3308 | SCOH- | 7E30K33A70S | + | MANTKYNEEFLLYLAGFVDGDGSIIAQIKPKQSAKFKHQ | 578 |
| | HSV8b | 75H77Y80K96 | | LSLTFQVTOKTQRRWFLDKLVDEIGVGYVRDSGSVSHY | |
| | 562-E | E132V_8K198 | | YLSKIKPLHNFLTQLQPFLELKQKQANLVLKIIEQLPSAK | |
| | | 32H33C40A61 | | ESPDKFLEVCTWVDQVAALNDSKTRKTTSETVRAVLDS | |
| | | R70S75N77K1 | | LSEKKKSSPAAGGSDKYNQALSKYNQALSKYNQALSG | |
| | | 05A132V | | GGGSNKKFLLYLAGFVDSDGSIIAQIKPNQHCKFKHQLA | |
| | | | | LTFQVTQKTQRRWFLDKLVDRIGVGYVRDSGSVSNYKL | |
| | | | | SEIKPLHNFLTQLQPFLKLKQKQANLALKIIEQLPSAKES | |
| | | | | PDKFLEVCTWVDQVAALNDSKTRKTTSETVRAVLDSLS | |
| | | | | EKKKSSP | |
| pCLS3309 | SCOH- | 7E30K33R70S | + | MANTKYNEEFLLYLAGFVDGDGSIIAQIKPKQSRKFKHQ | 579 |
| | HSV8b | 75H77Y96E_8 | | LSLTFQVTQKTQRRWFLDKLVDEIGVGYVRDSGSVSHY | |
| | u-A | K19S32H33C4 | | YLSEIKPLHNFLTQLQPFLELKQKQANLVLKIIEQLPSAK | |
| | | 0A44R61R68Y | | ESPDKFLEVCTWVDQIAALNDSKTRKTTSETVRAVLDSL | |
| | | 70S75Y77N | | SEKKKSSPAAGGSDKYNQALSKYNQALSKYNQALSGG | |
| | | | | GGSNKKFLLYLAGFVDSDGSIIAQIKPNQHCKFKHQLAL | |
| | | | | TFRVTQKTQRRWFLDKLVDRIGVGYVYDSGSVSYYNLS | |
| | | | | EIKPLHNFLTQLQPFLKLKQKQANLVLKIIEQLPSAKESP | |
| | | | | DKFLEVCTWVDQIAALNDSKTRKTTSETVRAVLDSLSEK | |
| | | | | KKSSP | |
| pCLS3310 | SCOH- | 7E30K33R70S | + | MANTKYNEEFLLYLAGFVDGDGSIIAQIKPKQSRKFKHQ | 580 |
| | HSV8b | 75H77Y96E13 | | LSLTFQVTOKTQRRWFLDKLVDEIGVGYVRDSGSVSHY | |
| | u-B | 2V_8K19S32H | | YLSEIKPLHNFLTQLQPFLELKQKQANLVLKIIEQLPSAK | |
| | | 33C40A44R61 | | ESPDKFLEVCIVVVDQVAALNDSKTRKTTSETVRAVLDS | |
| | | R68Y70S75Y7 | | LSEKKKSSPAAGGSDKYNQALSKYNQALSKYNQALSG | |
| | | 7N132V | | GGGSNKKFLLYLAGFVDSDGSIIAQIKPNQHCKFKHQLA | |
| | | | | LTFRVTQKTQRRWFLDKLVDRIGVGYVYDSGSVSYYNL | |
| | | | | SEIKPLHNFLTQLQPFLKLKQKQANLVLKIIEQLPSAKES | |
| | | | | PDKFLEVCTWVDQVAALNDSKTRKTTSETVRAVLDSLS | |
| | | | | EKKKSSP | |

[0557] d) Results

[0558] The activity of the single chain molecules against the HSV8 target was monitored using the previously described CHO assay along with our internal control SCOH-RAG (pCLS2222, FIG. 16) and I-Sce I meganucleases.

[0559] All comparisons were done upon DNA dose response of transfected variant DNA. All the single molecules displayed strong cleavage activity of HSV8 target in CHO assay as listed in Table XXXXII.

[0560] Variants shared specific behaviour upon assayed dose depending on the mutation profile they bear. For Example, pCLS3306 displays an higher activity than I-Sce I control and has a similar profile than SCOH-RAG control. Its activity is high even at low dose (0.2 ng DNA) and reaches a plateau at 6 ng. All of the variants described in Table XXXXII are active and can be used for the HSV-1 virus UL30 gene targeting and cleavage.

### EXAMPLE 6

### Strategy for Engineering Meganucleases Cleaving Target from the UL5 Gene in HSV1 Genome

[0561] I-CreI heterodimers capable of cleaving a target sequence (HSV9: GC-AAG-AC-CAC-GTAA-GGC-AG-GGG-GG SEQ ID NO:491) were identified using methods derived from those described in Chames et al. (Nucleic Acids Res., 2005, 33, e178), Arnould et al. (J. Mol. Biol., 2006, 355, 443-458), Smith et al. (Nucleic Acids Res., 2006, 34, e149), Arnould et al. (Arnould et al. J Mol. Biol. 2007 371:49-65). These results were then utilized to design single-chain meganucleases directed against the target sequence of SEQ ID NO:491. These single-chain meganucleases were cloned into mammalian expression vectors and tested for HSV9 cleavage in CHO cells. Strong cleavage activity of the HSV9 target could be observed for these single chain molecules in mammalian cells.

### EXAMPLE 6.1

### Identification of Meganucleases Cleaving HSV9

[0562] I-CreI variants potentially cleaving the HSV9 target sequence in heterodimeric form were constructed by genetic engineering. Pairs of such variants were then co-expressed in yeast. Upon co-expression, one obtains three molecular species, namely two homodimers and one heterodimer. It was then determined whether the heterodimers were capable of cutting the HSV9 target sequence of SEQ ID NO:491.

[0563] a) Construction of Variants of the I-CreI Meganuclease Cleaving Palindromic Sequences Derived from the HSV9 Target Sequence

[0564] The HSV9 sequence is partially a combination of the 10AAG_P (SEQ ID NO:493), 5CAC_P (SEQ ID NO:494), 10CCC_P (SEQ ID NO:495), 5GCC_P (SEQ ID NO:496), target sequences which are shown on FIG. 51. These sequences are cleaved by meganucleases obtained as described in International PCT applications WO 2006/097784 and WO 2006/097853, Arnould et al. (J. Mol. Biol., 2006, 355, 443-458) and Smith et al. (Nucleic Acids Res., 2006). Thus, HSV9 should be cleaved by combinatorial variants resulting from these previously identified meganucleases.

[0565] The GTAA sequence of the HSV9 target in −2 to 2 was first substituted with the GTAC sequence from C1221, resulting in target HSV9.2 (FIG. 51).

[0566] Two palindromic targets, HSV9.3 (HSV9.5) and HSV9.4 (HSV9.6), were derived from HSV9 (FIG. 51). Since HSV9.3 and HSV9.4 are palindromic, they should be cleaved by homodimeric proteins. Therefore, homodimeric I-CreI variants cleaving either the HSV9.3 palindromic target sequence of SEQ ID NO:497 or the HSV9.4 palindromic target sequence of SEQ ID NO:498 were constructed using methods derived from those described in Chames et al. (Nucleic Acids Res., 2005, 33, e178), Arnould et al. (J. Mol. Biol., 2006, 355, 443-458), Smith et al. (Nucleic Acids Res., 2006, 34, e149) and Arnould et al. (Arnould et al. J Mol. Biol. 2007 371:49-65).

[0567] b) Construction of Target Vector

[0568] An oligonucleotide of SEQ ID NO:581, corresponding to the HSV9 target sequence flanked by gateway cloning sequences, was ordered from PROLIGO. This oligo has the following sequence: TGGCATACAAGTTTGCAAGACCACGTA AGGCAGGGGGGCAATCG TCTGTCA. Double-stranded target DNA, generated by PCR amplification of the single stranded oligonucleotide, was cloned into the pCLS1055 yeast reporter vector using the Gateway protocol (INVITROGEN).

[0569] Yeast reporter vector was transformed into the FYBL2-7B Saccharomyces cerevisiae strain having the following genotype: MAT a, ura3Δ851, trp1Δ63, leu2Δ1, lys2Δ202. The resulting strain corresponds to a reporter strain.

[0570] c) Co-Expression of Variants

[0571] The open reading frames coding for the variants cleaving the HSV9.6 (and HSV9.4) or the HSV9.5 (and HSV9.3) sequence were cloned in the pCLS542 expression vector and in the pCLS1107 expression vector, respectively. Yeast DNA from these variants was extracted using standard protocols and was used to transform E. coli. The resulting plasmids were then used to co-transform yeast. Transformants were selected on synthetic medium lacking leucine and containing G418.

[0572] d) Mating of Meganucleases Coexpressing Clones and Screening in Yeast

[0573] Mating was performed using a colony gridder (QpixII, Genetix).

[0574] Variants were gridded on nylon filters covering YPD plates, using a low gridding density (4-6 spots/cm²). A second gridding process was performed on the same filters to spot a second layer consisting of different reporter-harboring yeast strains for each target. Membranes were placed on solid agar YPD rich medium, and incubated at 30° C. for one night, to allow mating. Next, filters were transferred to synthetic medium, lacking leucine and tryptophan, adding G418, with galactose (2%) as a carbon source, and incubated for five days at 37° C., to select for diploids carrying the expression and target vectors. After 5 days, filters were placed on solid agarose medium with 0.02% X-Gal in 0.5 M sodium phosphate buffer, pH 7.0, 0.1% SDS, 6% dimethyl formamide (DMF), 7 mM β-mercaptoethanol, 1% agarose, and incubated at 37° C., to monitor β-galactosidase activity. Results were analyzed by scanning and quantification was performed using an appropriate software.

[0575] e) Results

[0576] Co-expression of different variants resulted in cleavage of the HSV9 target in 24 tested combinations. Functional combinations are summarized in Table XXXXIII here below. In this Table, “+” indicates a functional combination on the HSV9 target sequence, i.e., the heterodimer is capable of cleaving the HSV9 target sequence.

[0577] HSV9 target is recognized and cleaved by the meganucleases shown in Table XXXXIII.

TABLE XXXXIII

| | | Amino acids positions and residues | | | | | |
|---|---|---|---|---|---|---|---|
| | | of the I-CreI variants cleaving the HSV9.5 (SEQ ID NO: 499) (and .3 | | | | | |
| | | (SEQ ID NO: 497)) target | | | | | |
| | | 30G 38R | | 32T 33R | | | |
| | | 44I 68E | 30G 38R | 44V 68E | | 44N 68E | 32G 44V |
| | | 75N 77R | 44V 68E | 75N 77R | 44K | 70S 75R | 68E 75N |
| | | 80K | 75N 77R | 80K | (SEQ | 77R | 77R 80K |
| | | (SEQ ID | (SEQ ID | (SEQ ID | ID | (SEQ ID | (SEQ ID |
| | | NO: 522) | NO: 523) | NO: 524) | NO: 525) | NO: 526) | NO: 527) |
| Amino acids positions | 30R 38E 68Y | + | + | + | + | + | + |
| and residues of the | 70S 75R 77Q | | | | | | |
| I-CreI variants | (SEQ ID | | | | | | |
| cleaving the HSV9.6 | NO: 528) | | | | | | |
| (SEQ ID NO: 500) (and .4 | 30R 38E 44K | | | | + | | |
| (SEQ ID NO: 498)) target | 61G 68E 70S | | | | | | |
| | 72T 75N 77R | | | | | | |
| | 80K 92R 96R | | | | | | |
| | 105A 154R | | | | | | |
| | (SEQ ID | | | | | | |
| | NO: 529) | | | | | | |
| | 30R 38E 68Y | + | + | + | + | + | + |
| | 70S 75N 77R | | | | | | |
| | 82E | | | | | | |
| | (SEQ ID | | | | | | |
| | NO: 530) | | | | | | |
| | 30R 38E 68N | + | + | + | + | + | + |
| | 70S 75R 77V | | | | | | |
| | (SEQ ID | | | | | | |
| | NO: 531) | | | | | | |

[0578] In conclusion, several heterodimeric I-CreI variants, capable of cleaving the HSV9 target sequence in yeast, were identified.

### EXAMPLE 6.2

### Covalent Assembly as Single Chain and Improvement of Meganucleases Cleaving HSV9

[0579] I-CreI variants able to efficiently cleave the HSV9 target in yeast when forming heterodimers are described hereabove in Example 6.1. Among them, two couples have been chosen as scaffold for further single chain meganuclease assembly and activity improvement. The screen and validation in CHO cells is a single-strand annealing (SSA) based assay where cleavage of the target by the meganucleases induces homologous recombination and expression of a LagoZ reporter gene (a derivative of the bacterial lacZ gene).

[0580] a) Cloning of HSV9 Target in a Vector for CHO Screen

[0581] An oligonucleotide corresponding to the HSV9 target sequence flanked by gateway cloning sequences, was ordered from PROLIGO (SEQ ID NO:582; TGGCATACAAGTTTGCAAGACCACGTAAGGCAGGGGGGCAAT CGTCTGTCA). Double-stranded target DNA, generated by PCR amplification of the single stranded oligonucleotide, was cloned using the Gateway protocol (INVITROGEN) into the pCLS1058 CHO reporter vector. Cloned target was verified by sequencing (MILLEGEN).

[0582] b) Gene Synthesis and Cloning of HSV9 Meganucleases

[0583] The open-reading frames coding for single chain meganuclease variants listed in Table XXXXIV were generated by synthetic gene assembly at MWG-EUROFINS (Les Ulis, France) and cloned in into the pCLS1853 expression vector using the AscI and XhoI restriction enzymes for internal fragment replacement.

[0584] c) Extrachromosomal Assay in Mammalian Cells

[0585] CHO K1 cells were transfected as described in Example 1.2. 72 hours after transfection, culture medium was removed and 150 μl of lysis/revelation buffer for β-galactosidase liquid assay was added. After incubation at 37° C., OD was measured at 420 nm. The entire process is performed on an automated Velocity11 BioCel platform. Per assay, 150 ng of target vector was cotransfected with an increasing quantity of variant DNA from 0 to 25 ng. The total amount of transfected DNA was completed to 175 ng (target DNA, variant DNA, carrier DNA) using an empty vector (pCLS0002).

[0586] d) Results

[0587] Among the I-CreI variants able to cleave the HSV9 target in yeast when forming heterodimers (in Example 6.1), two couples have been chosen as scaffolds for further single chain meganuclease assembly and directed mutagenesis for activity improvement (Table XXXXIV).

TABLE XXXXIV

| | Amino acids positions | |
|---|---|---|
| | and residues of | Amino acids positions |
| | the I-CreI variants | and residues of the |
| HSV9 | cleaving HSV9.5 | I-CreI variants cleaving |
| couple | (and .3) | HSV9.6 (and .4) |
| HSV9-b56 | 30G 38R 44I 68E 75N 77R 80K | 30R 38E 68Y 70S 75R 77Q |
| | (SEQ ID NO: 522) | (SEQ ID NO: 528) |
| HSV9-bu | 32T 33R 44V 68E 75N 77R 80K | 30R 38E 68Y 70S 75R 77Q |
| | (SEQ ID NO: 524) | (SEQ ID NO: 528) |

[0588] The two HSV9b56 and bu heterodimers give high cleavage activity in yeast. HSV9 b56 is a couple of HSV9.5×HSV9.6 cutters that bear the following mutations in comparison with the I-CreI wild type sequence: 30G 38R 44I 68E 75N 77R 80K (HSV9.5)×30R 38E 68Y 70S 75R 77Q (HSV9.6). HSV9 bu is a couple of HSV9.5×HSV9.6 cutters that bear the following mutations in comparison with the I-CreI wild type sequence: 32T 33R 44V 68E 75N 77R 80K (HSV9.5)×30R 38E 68Y 70S 75R 77Q (HSV9.6).

[0589] Single chain constructs were engineered using the linker RM2 of SEQ ID NO 464 (AAGGSDKYNQALSKYNQALSKYNQALSGGGGS), thus resulting in the production of the single chain molecule: HSV9.5-variant-linkerRM2-HSV9.6-variant. During this design step, the G19S mutation was introduced in the C-terminal variant. In addition, mutations K7E, K96E were introduced into the HSV9.5 variant and mutations E8K, E61R into the HSV9.6 variant to create the single chain molecule: HSV9.5-variant (K7E K96E)-linkerRM2-HSV9.6-variant (E8K E61R G19S) that is further called SCOH-HSV9b56 and SCOH-HSV9bu depending on the HSV9 couple used as scaffold (Tables XXXXIV and XXXXV). Some additional amino-acid substitutions have been found in previous studies to enhance the activity of I-CreI derivatives: some of these mutations correspond to the replacement of Glutamic acid 80 with Lysine (E80K), Valine 105 with Alanine (V105A) and

[0590] Isoleucine 132 with Valine (I132V). The resulting proteins are shown in Table XXXXV below. All the single chain molecules were assayed in CHO for cleavage of the HSV9 target.

TABLE XXXXV
Example of Single Chain series designed for strong
cleavage of HSV9 target in CHO cells

| | | | HSV9 | | SEQ |
|---|---|---|---|---|---|
| | | mutations in | cleavage | | ID |
| plasmid | variant | Single Chain | in CHO | Protein sequence | NO: |
| pCLS3311 | SCOH- | 7E30G38R44I | + | MANTKYNEEFLLYLAGFVDGDGSIIAQIKPGQSYK | 583 |
| | HSV9- | 68E75N77R80 | | FKHRLSLTFIVTQKTQRRWFLDKLVDEIGVGYVE | |
| | b56-A | K96E_8K19S3 | | DRGSVSNYRLSKIKPLHNFLTQLQPFLELKQKQAN | |
| | | 0R38E61R68Y | | LVLKIIEQLPSAKESPDKFLEVCTWVDQIAALNDS | |
| | | 70S75R77Q | | KTRKTTSETVRAVLDSLSEKKKSSPAAGGSDKYN | |
| | | | | QALSKYNQALSKYNQALSGGGGSNKKFLLYLAG | |
| | | | | FVDSDGSIIAQIKPRQSYKFKHELSLTFQVTQKTQR | |
| | | | | RWFLDKLVDRIGVGYVYDSGSVSRYQLSEIKPLH | |
| | | | | NFLTQLQPFLKLKQKQANLVLKIIEQLPSAKESPD | |
| | | | | KFLEVCTWVDQIAALNDSKTRKTTSETVRAVLDS | |
| | | | | LSEKKKSSP | |
| pCLS3312 | SCOH- | 7E30G38R44I | + | MANTKYNEEFLLYLAGFVDGDGSIIAQIKPGQSYK | 584 |
| | HSV9- | 68E75N77R80 | | FKHRLSLTFIVTQKTQRRWFLDKLVDEIGVGYVE | |
| | b56-C | K96E132V_8K | | DRGSVSNYRLSKIKPLHNFLTQLQPFLELKQKQAN | |
| | | 19S30R38E61 | | LVLKIIEQLPSAKESPDKFLEVCTWVDQVAALNDS | |
| | | R68Y70S75R7 | | KTRKTTSETVRAVLDSLSEKKKSSPAAGGSDKYN | |
| | | 7Q132V | | QALSKYNQALSKYNQALSGGGGSNKKFLLYLAG | |
| | | | | FVDSDGSIIAQIKPRQSYKFKHELSLTFQVTQKTQR | |
| | | | | RWFLDKLVDRIGVGYVYDSGSVSRYQLSEIKPLH | |
| | | | | NFLTQLQPFLKLKQKQANLVLKIIEQLPSAKESPD | |
| | | | | KFLEVCTWVDQVAALNDSKTRKTTSETVRAVLDS | |
| | | | | LSEKKKSSP | |
| pCLS3313 | SCOH- | 7E30GG38R44I | + | MANTKYNEEFLLYLAGFVDGDGSIIAQIKPGQSYK | 585 |
| | HSV9- | 68E75N77R80 | | FKHRLSLTFIVTQKTQRRWELDKLVDEIGVGYVE | |
| | b56-E | K96E132V_8K | | DRGSVSNYRLSKIKPLHNFLTQLQPFLELKQKQAN | |
| | | 19S30R38E61 | | LVLKIIEQLPSAKESPDKFLEVCTWVDQVAALNDS | |
| | | R68Y70S75R7 | | KTRKTTSETVRAVLDSLSEKKKSSPAAGGSDKYN | |
| | | 7Q105A132V | | QALSKYNQALSKYNQALSGGGGSNKKFLLYLAG | |
| | | | | FVDSDGSIIAQIKPRQSYKFKHELSLTFQVTQKTQR | |
| | | | | RWFLDKLVDRIGVGYVYDSGSVSRYQLSEIKPLH | |
| | | | | NFLTQLQPFLKLKQKQANLALKITEQLPSAKESPD | |
| | | | | KFLEVCTWVDQVAALNDSKTRKTTSETVRAVLDS | |
| | | | | LSEKKKSSP | |
| pCLS3314 | SCOH- | 7E30G38R44I | + | MANTKYNEEFLLYLAGFVDGDGSIIAQIKPGQSYK | 586 |
| | HSV9- | 68E75N77R80 | | FKHRLSLTFIVTQKTQRRWELDKLVDEIGVGYVE | |
| | b56-F | K96E105A132 | | DRGSVSNYRLSKIKPLHNFLTQLQPFLELKQKQAN | |
| | | V_8K19830R3 | | LALKIIEQLPSAKESPDKFLEVCTWVDQVAALNDS | |
| | | 8E61R68Y70S | | KTRKTTSETVRAVLDSLSEKKKSSPAAGGSDKYN | |
| | | 75R77Q80K10 | | QALSKYNQALSKYNQALSGGGGSNKKFLLYLAG | |
| | | 5A132V | | FVDSDGSIIAQIKPRQSYKFKHELSLTFQVTQKTQR | |
| | | | | RWFLDKLVDRIGVGYVYDSGSVSRYQLSKIKPLH | |
| | | | | NFLTQLQPFLKLKQKQANLALKIIEQLPSAKESPD | |
| | | | | KFLEVCTWVDQVAALNDSKTRKTTSETVRAVLDS | |
| | | | | LSEKKKSSP | |
| pCLS3315 | SCOH- | 7E32T33R44V | + | MANTKYNEEFLLYLAGFVDGDGSHAQIKPNQTRK | 587 |
| | HSV9- | 68E75N77R80 | | FKHQLSLTFVVTQKTQRRWFLDKLVDEIGVGYVE | |
| | bu-A | K96E_8K19S3 | | DRGSVSNYRLSKIKPLHNFLTQLQPFLELKQKQAN | |
| | | 0R38E61R68Y | | LVLKIIEQLPSAKESPDKFLEVCTWVDQIAALNDS | |
| | | 70S75R77Q | | KTRKTTSETVRAVLDSLSEKKKSSPAAGGSDKYN | |
| | | | | QALSKYNQALSKYNQALSGGGGSNKKFLLYLAG | |
| | | | | FVDSDGSIIAQIKPRQSYKFKHELSLTFQVTQKTQR | |
| | | | | RWFLDKLVDRIGVGYVYDSGSVSRYQLSEIKPLH | |
| | | | | NFLTQLQPFLKLKQKQANLVLKIIEQLPSAKESPD | |
| | | | | KFLEVCTWVDQIAALNDSKTRKTTSETVRAVLDS | |
| | | | | LSEKKKSSP | |
| pCLS3316 | SCOH- | 7E32T33R44V | + | MANTKYNEEFLLYLAGFVDGDGSIIAQIKPNQTRK | 588 |
| | HSV9- | 68E75N77R80 | | FKHQLSLTFVVTQKTQRRWELDKLVDEIGVGYVE | |
| | bu-C | K96E132V_8K | | DRGSVSNYRLSKIKPLHNFLTQLQPFLELKQKQAN | |
| | | 19S30R38E61 | | LVLKIIEQLPSAKESPDKFLEVCTWVDQVAALNDS | |
| | | R68Y70S75R7 | | KTRKTTSETVRAVLDSLSEKKKSSPAAGGSDKYN | |
| | | 7Q132V | | QALSKYNQALSKYNQALSGGGGSNKKFLLYLAG | |
| | | | | FVDSDGSIIAQIKPRQSYKFKHELSLTFQVTQKTQR | |
| | | | | RWFLDKLVDRIGVGYVYDSGSVSRYQLSEIKPLH | |
| | | | | NFLTQLQPFLKLKQKQANLVLKIIEQLPSAKESPD | |
| | | | | KFLEVCTWVDQVAALNDSKTRKTTSETVRAVLDS | |
| | | | | LSEKKKSSP | |
| pCLS3317 | SCOH- | 7E32T33R44V | + | MANTKYNEEFLLYLAGFVDGDGSIIAQIKPNQTRK | 589 |
| | HSV9- | 68E75N77R80 | | FKHQLSLTFVVTQKTQRRWELDKLVDE1GVGYVE | |
| | bu-E | K96E132V_8K | | DRGSVSNYRLSKIKPLHNFLTQLQPFLELKQKQAN | |
| | | 19S30R38E61 | | LVLKIIEQLPSAKESPDKFLEVCTWVDQVAALNDS | |
| | | R68Y70S75R7 | | KTRKTTSETVRAVLDSLSEKKKSSPAAGGSDKYN | |
| | | 7Q105A132V | | QALSKYNQALSKYNQALSGGGGSNKKFLLYLAG | |
| | | | | FVDSDGSIIAQIKPRQSYKFKHELSLTFQVTQKTQR | |
| | | | | RWFLDKLVDRIGVGYVYDSGSVSRYQLSEIKPLH | |
| | | | | NFLTQLQPFLKLKQKQANLALKIIEQLPSAKESPD | |
| | | | | KFLEVCTWVDQVAALNDSKTRKTTSETVRAVLDS | |
| | | | | LSEKKKSSP | |
| pCLS3318 | SCOH- | 7E32T33R44V | + | MANTKYNEEFLLYLAGFVDGDGSIIAQIKPNQTRK | 590 |
| | HSV9- | 68E75N77R80 | | FKHQLSLTFVVTQKTQRRWFLDKLVDEIGVGYVE | |
| | bu-F | K96E105A132 | | DRGSVSNYRLSKIKPLHNFLTQLQPFLELKQKQAN | |
| | | V_8K19S30R3 | | LALKIIEQLPSAKESPDKFLEVCTWVDQVAALNDS | |
| | | 8E61R68Y70S | | KTRKTTSETVRAVLDSLSEKKKSSPAAGGSDKYN | |
| | | 75R77Q80K10 | | QALSKYNQALSKYNQALSGGGGSNKKFLLYLAG | |
| | | 5A132V | | FVDSDGSIIAQIKPRQSYKFKHELSLTFQVTQKTQR | |
| | | | | RWFLDKLVDRIGVGYVYDSGSVSRYQLSKIKPLH | |
| | | | | NFLTQLQPFLKLKQKQANLALKIIEQLPSAKESPD | |
| | | | | KFLEVCTWVDQVAALNDSKTRKTTSETVRAVLDS | |
| | | | | LSEKKKSSP | |

[0591] d) Results

[0592] The activity of the single chain molecules against the HSV9 target was monitored using the previously described CHO assay along with our internal control SCOH-RAG and I-Sce I meganucleases. All comparisons were done upon DNA dose response of transfected variant DNA. All the single molecules displayed strong cleavage activity of HSV9 target in CHO assay as listed in Table XXXXV.

[0593] Variants shared specific behaviour upon assayed dose depending on the mutation profile they bear. For Example, pCLS3318 displays a higher activity than I-Sce I control and SCOH-RAG control (FIG. 42). Its activity has reached the plateau even at the lowest dose (0.2 ng DNA). All of the variants described in Table XXXXV are active and can be used for the HSV-1 virus UL5 gene targeting and cleavage.

### EXAMPLE 7

### Strategy for Engineering Novel Meganucleases Cleaving Targets from the RL2/ICP₀ Gene in HSV-1 Genome

[0594] A first series of meganucleases targeting the RL2 gene encoding the ICP0 or a0 protein has been described previously (HSV4 target). In the following lines an alternative sequence for gene targeting and cleavage of RL2 is described (HSV12). The RL2 gene is a 3.6 kb gene repeated twice in TRL (5 to 5698) and IRL (120673 to 124285) regions is formed of three exons: position 2261 to 2317, 3083 to 3749, 3886 to 5489 and 120882 to 122485,122622 to 123288, 124054 to 124110.

[0595] HSV12 sequence is a 24 bp (non-palindromic) target (HSV12: CC-TGG-AC-ATG-GAGA-CGG-GG-AAC-AT SEQ ID NO:501) present in the exon 3 which corresponds to positions 5168 to 5191 and 121180 to 121203 in the two copies of the HSV-1 ICP0 gene (accession number NC_{—}001806; FIG. 23).

[0596] I-CreI heterodimers capable of cleaving a target sequence HSV12 (SEQ ID NO:501) were identified using methods derived from those described in Chames et al. (Nucleic Acids Res., 2005, 33, e178), Arnould et al. (J. Mol. Biol., 2006, 355, 443-458), Smith et al. (Nucleic Acids Res., 2006, 34, e149), Arnould et al. (Arnould et al. J Mol Biol. 2007 371:49-65). These results were then utilized to design single-chain meganucleases directed against the target sequence of SEQ ID NO:501. These single-chain meganucleases were cloned into mammalian expression vectors and tested for HSV12 cleavage in CHO cells. Strong cleavage activity of the HSV12 target could be observed for these single chain molecules in mammalian cells.

### EXAMPLE 7.1

### Identification of Meganucleases Cleaving HSV12

[0597] I-CreI variants potentially cleaving the HSV12 target sequence in heterodimeric form were constructed by genetic engineering. Pairs of such variants were then co-expressed in yeast. Upon co-expression, one obtains three molecular species, namely two homodimers and one heterodimer. It was then determined whether the heterodimers were capable of cutting the HSV12 target sequence of SEQ ID NO:501.

[0598] a) Construction of Variants of the I-CreI Meganuclease Cleaving Palindromic Sequences Derived from the HSV12 Target Sequence

[0599] The HSV12 sequence is partially a combination of the 10TGG_P (SEQ ID NO:503), 5ATG_P (SEQ ID NO:504), 10GTT_P (SEQ ID NO:505), 5CCG_P (SEQ ID NO:506) target sequences which are shown on FIG. 52. These sequences are cleaved by meganucleases obtained as described in International PCT applications WO 2006/097784 and WO 2006/097853, Arnould et al. (J. Mol. Biol., 2006, 355, 443-458) and Smith et al. (Nucleic Acids Res., 2006). Thus, HSV12 should be cleaved by combinatorial variants resulting from these previously identified meganucleases.

[0600] The GAGA sequence of HSV12 target in −2 to 2 was first substituted with the GTAC sequence from C1221, resulting in target HSV12.2 (FIG. 52).

[0601] Two palindromic targets, HSV12.3 (and HSV12.5) and HSV12.4 (and HSV12.6), were derived from HSV12 (FIG. 52). Since HSV12.3 and HSV12.4 are palindromic, they should be cleaved by homodimeric proteins. Therefore, homodimeric I-CreI variants cleaving either the HSV12.3 palindromic target sequence of SEQ ID NO:507 or the HSV12.4 palindromic target sequence of SEQ ID NO:508 were constructed using methods derived from those described in Chames et al. (Nucleic Acids Res., 2005, 33, e178), Arnould et at (J. Mol. Biol., 2006, 355, 443-458), Smith et al. (Nucleic Acids Res., 2006, 34, e149) and Arnould et al. (Arnould et al. J Mol Biol. 2007 371:49-65).

[0602] b) Construction of Target Vector

[0603] An oligonucleotide of SEQ ID NO:591, corresponding to the HSV12 target sequence flanked by gateway cloning sequences, was ordered from PROLIGO. This oligo has the following sequence: TGGCATACAAGTTTCCTG GACATGGAGACGGGGAACATCAATCGTCTGTCA. Double-stranded target DNA, generated by PCR amplification of the single stranded oligonucleotide, was cloned into the pCLS1055 yeast reporter vector using the Gateway protocol (INVITROGEN).

Yeast reporter vector was transformed into the FYBL2-7B Saccharomyces cerevisiae strain having the following genotype: MAT a, ura3Δ851, trp1Δ63, leu2Δ1, lys2Δ202. The resulting strain corresponds to a reporter strain.

[0604] c) Co-Expression of Variants

[0605] The open reading frames coding for the variants cleaving the HSV12.6 (and HSV12.4) or the HSV12.5 (and HSV12.3) sequence were cloned in the pCLS542 expression vector and in the pCLS1107 expression vector, respectively. Yeast DNA from these variants was extracted using standard protocols and was used to transform E. coli. The resulting plasmids were then used to co-transform yeast. Transformants were selected on synthetic medium lacking leucine and containing G418.

[0606] d) Mating of Meganucleases Coexpressing Clones and Screening in Yeast

[0607] Mating was performed using a colony gridder (QpixII, Genetix). Variants were gridded on nylon filters covering YPD plates, using a low gridding density (4-6 spots/cm²). A second gridding process was performed on the same filters to spot a second layer consisting of different reporter-harboring yeast strains for each target. Membranes were placed on solid agar YPD rich medium, and incubated at 30° C. for one night, to allow mating. Next, filters were transferred to synthetic medium, lacking leucine and tryptophan, adding G418, with galactose (2%) as a carbon source, and incubated for five days at 37° C., to select for diploids carrying the expression and target vectors. After 5 days, filters were placed on solid agarose medium with 0.02% X-Gal in 0.5 M sodium phosphate buffer, pH 7.0, 0.1% SDS, 6% dimethyl formamide (DMF), 7 mM β-mercaptoethanol, 1% agarose, and incubated at 37° C., to monitor β-galactosidase activity. Results were analyzed by scanning and quantification was performed using an appropriate software.

[0608] e) Results

[0609] Co-expression of different variants resulted in cleavage of the HSV12 target in 54 tested combinations. Functional combinations are summarized in Table XXXXVI here below. In this Table, “+” indicates a functional combination on the HSV12 target sequence, i.e., the heterodimer is capable of cleaving the HSV12 target sequence.

TABLE XXXXVI

| | | Amino acids positions and residues | | | | | | | | |
|---|---|---|---|---|---|---|---|---|---|---|
| | | of the I-CreI variants cleaving the HSV12.5 (and.3) target | | | | | | | | |
| | | | | | | | | | 24V 33C | 24V 33C |
| | | | 24V 33C | 11V 24V | 24V 33C | 24V 33C | 24V 33C | 24V 33C | 38S 44I | 38S 44I |
| | | 24V 33C 38S | 38S 44I | 33C 38S | 38S 44I | 38S 44I | 38S 44I | 38S 44I | 50R 70S | 50R 70S |
| | | 44I 50R 70S | 54L 70S | 44I 50R | 54L 70S | 70S 75N | 70S 75N | 50R 70S | 75N 77R | 75N 77R |
| | | 75N 77R | 75N 77R | 70S 75N | 75N 77R | 77R 81T | 77R 80K | 75N 77R | 79G | 79G |
| | | 132V | 132V | 77R 132V | 129A 160R | 132V | 92R 132V | 132V 160R | 132V | 105A |
| | | (SEQ ID | (SEQ ID | (SEQ ID | (SEQ ID | (SEQ ID | (SEQ ID | (SEQ ID | (SEQ ID | (SEQ ID |
| | | NO: 25) | NO: 592) | NO: 593) | NO: 594) | NO: 595) | NO: 596) | NO: 597) | NO: 598) | NO: 599) |
| Amino acids | 30R 33S 44K | + | + | + | + | + | + | + | + | + |
| positions and | 68Y 70S 77T | | | | | | | | | |
| residues of | 105A 139R | | | | | | | | | |
| the I-CreI | 153A | | | | | | | | | |
| variants | (SEQ ID | | | | | | | | | |
| cleaving | NO: 600) | | | | | | | | | |
| the HSV12.6 | 8K 30R 33S | + | + | + | + | + | + | + | + | + |
| (and.4) target | 44K 66H 68Y | | | | | | | | | |
| | 70S 77T 139R | | | | | | | | | |
| | 160E | | | | | | | | | |
| | (SEQ ID | | | | | | | | | |
| | NO: 601) | | | | | | | | | |
| | 8K 30R 33S | + | + | + | + | + | + | + | + | + |
| | 44K 66H 68Y | | | | | | | | | |
| | 70S 77T 82R | | | | | | | | | |
| | 87I 139R | | | | | | | | | |
| | (SEQ ID | | | | | | | | | |
| | NO: 602) | | | | | | | | | |
| | 8K 30R 33S | + | + | + | + | + | + | + | + | + |
| | 44K 66H 68Y | | | | | | | | | |
| | 70S 77T 87I | | | | | | | | | |
| | 139R | | | | | | | | | |
| | (SEQ ID | | | | | | | | | |
| | NO: 603) | | | | | | | | | |
| | 8K 30R 33S | + | + | + | + | + | + | + | + | + |
| | 44K 66H 68Y | | | | | | | | | |
| | 70S 77T 87I | | | | | | | | | |
| | 139R 163S | | | | | | | | | |
| | (SEQ ID | | | | | | | | | |
| | NO: 604) | | | | | | | | | |
| | 30R 33S 44K | + | + | + | + | + | + | + | + | + |
| | 66N 68Y 70S | | | | | | | | | |
| | 77T 139R | | | | | | | | | |
| | (SEQ ID | | | | | | | | | |
| | NO: 605) | | | | | | | | | |

[0610] In conclusion, several heterodimeric I-CreI variants, capable of cleaving the HSV12 target sequence in yeast, were identified.

### EXAMPLE 7.2

### Covalent Assembly as Single Chain and Improvement of Meganucleases Cleaving HSV12

[0611] I-CreI variants able to efficiently cleave the HSV12 target in yeast when forming heterodimers are described hereabove in Example 7.1. Among them, one couple has been chosen as scaffold for further single chain meganuclease assembly and activity improvement. The screen and validation in CHO cells is a single-strand annealing (SSA) based assay where cleavage of the target by the meganucleases induces homologous recombination and expression of a LagoZ reporter gene (a derivative of the bacterial lacZ gene).

[0612] a) Cloning of HSV12 Target in a Vector for CHO Screen

[0613] An oligonucleotide corresponding to the HSV12 target sequence flanked by gateway cloning sequences, was ordered from PROLIGO (SEQ ID NO:606; TGGCATACAAGTTTCCTGGACATGGAGACGGGGAACATCAAT CGTCTGTCA). Double-stranded target DNA, generated by PCR amplification of the single stranded oligonucleotide, was cloned using the Gateway protocol (INVITROGEN) into the pCLS1058 CHO reporter vector. Cloned target was verified by sequencing (MILLEGEN).

[0614] b) Gene Synthesis and Cloning of HSV12 Meganucleases

[0615] The open-reading frames coding for single chain meganuclease variants listed in Table XXXXVIII were generated by synthetic gene assembly at TOP Gene Technologies, Inc (Montreal, CANADA) and cloned in into the pCLS1853 expression vector using the AscI and XhoI restriction enzymes for internal fragment replacement.

[0616] c) Extrachromosomal Assay in Mammalian Cells

[0617] CHO K1 cells were transfected as described in Example 1.2. 72 hours after transfection, culture medium was removed and 150 μl of lysis/revelation buffer for β-galactosidase liquid assay was added. After incubation at 37° C., OD was measured at 420 nm. The entire process is performed on an automated Velocity11 BioCel platform. Per assay, 150 ng of target vector was cotransfected with an increasing quantity of variant DNA from 0 to 25 ng. The total amount of transfected DNA was completed to 175 ng (target DNA, variant DNA, carrier DNA) using an empty vector (pCLS0002).

[0618] d) Results

[0619] Among the I-CreI variants able to cleave the HSV12 target in yeast when forming heterodimers (in Example 7.1), one couple has been chosen as scaffold for further single chain meganuclease assembly and directed mutagenesis for activity improvement (Table XXXXVII).

TABLE XXXXVII

| | Amino acids positions | Amino acids positions |
|---|---|---|
| | and residues of the I- | and residues of the I- |
| HSV12 | CreI variants | CreI variants cleaving |
| couple | cleaving HSV12.5 (and .3) | HSV12.6 (and .4) |
| HSV12- | 24V 33C 38S 44I 50R 70S | 8K 30R 33S 44K 66H 68Y |
| M1-ME | 75N 77R 132V (SEQ ID NO: 25) | 70S 77T 87I 139R 163S |
| | | (SEQ ID NO: 604) |

[0620] The HSV12-M1×HSV12-ME heterodimer give high cleavage activity in yeast. HSV12-M1 is a HSV12.5 cutter that bears the following mutations in comparison with the I-CreI wild type sequence: 24V 33C 38S 44I 50R 70S 75N 77R 132V. HSV12-ME is a HSV12.6 cutters that bears the following mutations in comparison with the I-CreI wild type sequence: 8K 30R 33S 44K 66H 68Y 70S 77T 87I 139R 163S.

[0621] Single chain constructs were engineered using the linker RM2 of SEQ ID NO 464 (AAGGSDKYNQALSKYNQALSKYNQALSGGGGS), thus resulting in the production of the single chain molecule: M1-linkerRM2-ME. During this design step, the G19S mutation was introduced in the C-terminal variant. In addition, mutations K7E, K96E were introduced into the HSV12.5 variant and mutation E61R (E8K already present) into the HSV12.6 variant to create the single chain molecule: HSV12.5-M1 (K7E K96E)-linkerRM2-HSV12.6-ME (E8K E61R G19S) that is further called SCOH-FISV12-M1-ME (SEQ ID NO:607) scaffold. Some additional amino-acid substitutions have been found in previous studies to enhance the activity of I-CreI derivatives: some of these mutations correspond to the replacement of Glutamic acid 80 with Lysine (E80K), Valine 105 with Alanine (V105A) and Isoleucine 132 with Valine (I132V). The resulting proteins are shown in Table XXXXVIII below. All the single chain molecules were assayed in CHO for cleavage of the HSV12 target.

TABLE XXXXVIII
Example of Single Chain series designed for strong
cleavage of HSV12 target in CHO cells

| | | | HSV12 | | |
|---|---|---|---|---|---|
| | | mutations in Single | cleavage | | SEQ |
| plasmid | variant | Chain | in CHO | protein sequence | ID |
| pCLS2632 | SCOH- | 7E24V33C38S44I50R70 | + | MANTKYNEEFLLYLAGFVDGDGS | 607 |
| | HV12-M1- | S75N77R96E132V_8K1 | | IVAQIKPNQSCKFKHSLSLTFIVTQ | |
| | ME | 9S30R33S44K61R66H6 | | KTRRRWFLDKLVDEIGVGYVRDS | |
| | | 8Y70S77T87I139R163S | | GSVSNYRLSEIKPLHNFLTQLQPFL | |
| | | | | ELKQKQANLVLKIIEQLPSAKESPD | |
| | | | | KFLEVCTWVDQVAALNDSKTRKT | |
| | | | | TSETVRAVLDSLSEKKKSSPAAGG | |
| | | | | SDKYNQALSKYNQALSKYNQALS | |
| | | | | GGGGSNKKFLLYLAGFVDSDGSII | |
| | | | | AQIKPRQSSKFKHQLSLTFKVTQK | |
| | | | | TQRRWFLDKLVDRIGVGHVYDSG | |
| | | | | SVSDYTLSEIKPLHNILTQLQPFLK | |
| | | | | LKQKQANLVLKIIEQLPSAKESPD | |
| | | | | KFLEVCTWVDQIAALNDSRTRKT | |
| | | | | TSETVRAVLDSLSEKKKSSS | |
| pCLS2633 | SCOH- | 7E24V33C38S44I50R70 | + | MANTKYNEEFLLYLAGFVDGDGS | 465 |
| | HV12-M1- | S75N77R96E132V_8K1 | | IVAQIKPNQSCKFKHSLSLTFIVTQ | |
| | ME-132V | 9S30R33S44K61R66H6 | | KTRRRWFLDKLVDEIGVGYVRDS | |
| | | 8Y70S77T87I132V139 | | GSVSNYRLSEIKPLHNFLTQLQPFL | |
| | | R163S | | ELKQKQANLVLKIIEQLPSAKESPD | |
| | | | | KFLEVCTWVDQVAALNDSKTRKT | |
| | | | | TSETVRAVLDSLSEKKKSSPAAGG | |
| | | | | SDKYNQALSKYNQALSKYNQALS | |
| | | | | GGGGSNKKFLLYLAGFVDSDGSII | |
| | | | | AQIKPRQSSKFKHQLSLTFKVTQK | |
| | | | | TQRRWFLDKLVDRIGVGHVYDSG | |
| | | | | SVSDYTLSEIKPLHNILTQLQPFLK | |
| | | | | LKQKQANLVLKIIEQLPSAKESPD | |
| | | | | KFLEVCTWVDQVAALNDSRTRKT | |
| | | | | TSETVRAVLDSLSEKKKSSS | |
| pCLS2634 | SCOH- | 7E24V33C38S44I50R70 | + | MANTKYNEEFLLYLAGFVDGDGS | 608 |
| | HV12-M1- | S75N77R80K96E132V_ | | IVAQIKPNQSCKFKHSLSLTFIVTQ | |
| | 80K-ME | 8K19S30R33S44K61R6 | | KTRRRWFLDKLVDEIGVGYVRDS | |
| | | 6H68Y70S77T87I139R | | GSVSNYRLSKIKPLHNFLTQLQPFL | |
| | | 163S | | ELKQKQANLVLKIIEQLPSAKESPD | |
| | | | | KFLEVCTWVDQVAALNDSKTRKT | |
| | | | | TSETVRAVLDSLSEKKKSSPAAGG | |
| | | | | SDKYNQALSKYNQALSKYNQALS | |
| | | | | GGGGSNKKFLLYLAGFVDSDGSII | |
| | | | | AQIKPRQSSKFKHQLSLTFKVTQK | |
| | | | | TQRRWFLDKLVDRIGVGHVYDSG | |
| | | | | SVSDYTLSEIKPLHNILTQLQPFLK | |
| | | | | LKQKQANLVLKIIEQLPSAKESPD | |
| | | | | KFLEVCTWVDQIAALNDSRTRKT | |
| | | | | TSETVRAVLDSLSEKKKSSS | |
| pCLS2635 | SCOH- | 7E24V33C38S44I50R70 | + | MANTKYNEEFLLYLAGFVDGDGS | 466 |
| | HV12-M1- | S75N77R80K96E132V_ | | IVAQIKPNQSCKFKHSLSLTFIVTQ | |
| | 80K-ME- | 8K19S30R33S44K61R6 | | KTRRRWFLDKLVDEIGVGYVRDS | |
| | 132V | 6H68Y70S77T87I132V | | GSVSNYRLSKIKPLHNFLTQLQPFL | |
| | | 139R163S | | ELKQKQANLVLKIIEQLPSAKESPD | |
| | | | | KFLEVCTWVDQVAALNDSKTRKT | |
| | | | | TSETVRAVLDSLSEKKKSSPAAGG | |
| | | | | SDKYNQALSKYNQALSKYNQALS | |
| | | | | GGGGSNKKFLLYLAGFVDSDGSII | |
| | | | | AQIKPRQSSKFKHQLSLTFKVTQK | |
| | | | | TQRRWFLDKLVDRIGVGHVYDSG | |
| | | | | SVSDYTLSEIKPLHNILTQLQPFLK | |
| | | | | LKQKQANLVLKIIEQLPSAKESPD | |
| | | | | KFLEVCTWVDQVAALNDSRTRKT | |
| | | | | TSETVRAVLDSLSEKKKSSS | |
| pCLS2636 | SCOH- | 7E24V33C38S44I50R70 | + | MANTKYNEEFLLYLAGFVDGDGS | 609 |
| | HV12-M1- | S75N77R96E105A132V | | IVAQIKPNQSCKFKHSLSLTFIVTQ | |
| | 105A-ME | _8K19S30R33S44K61R | | KTRRRWFLDKLVDEIGVGYVRDS | |
| | | 66H68Y70S77T87I139 | | GSVSNYRLSEIKPLHNFLTQLQPFL | |
| | | R163S | | ELKQKQANLALKIIEQLPSAKESPD | |
| | | | | KFLEVCTWVDQVAALNDSKTRKT | |
| | | | | TSETVRAVLDSLSEKKKSSPAAGG | |
| | | | | SDKYNQALSKYNQALSKYNQALS | |
| | | | | GGGGSNKKFLLYLAGFVDSDGSII | |
| | | | | AQIKPRQSSKFKHQLSLTFKVTQK | |
| | | | | TQRRWFLDKLVDRIGVGHVYDSG | |
| | | | | SVSDYTLSEIKPLHNILTQLQPFLK | |
| | | | | LKQKQANLVLKIIEQLPSAKESPD | |
| | | | | KFLEVCTWVDQIAALNDSRTRKT | |
| | | | | TSETVRAVLDSLSEKKKSSS | |
| pCLS2637 | SCOH- | 7E24V33C38S44I50R70 | + | MANTKYNEEFLLYLAGFVDGDGS | 610 |
| | HV12-M1- | S75N77R96E105A132V | | IVAQIKPNQSCKFKHSLSLTFIVTQ | |
| | 105A-ME- | _8K19S30R33S44K61R | | KTRRRWFLDKLVDEIGVGYVRDS | |
| | 132V | 66H68Y70S77T87I132 | | GSVSNYRLSEIKPLHNFLTQLQPFL | |
| | | V139R163S | | ELKQKQANLALKIIEQLPSAKESPD | |
| | | | | KFLEVCTWVDQVAALNDSKTRKT | |
| | | | | TSETVRAVLDSLSEKKKSSPAAGG | |
| | | | | SDKYNQALSKYNQALSKYNQALS | |
| | | | | GGGGSNKKFLLYLAGFVDSDGSII | |
| | | | | AQIKPRQSSKFKHQLSLTFKVTQK | |
| | | | | TQRRWFLDKLVDRIGVGHVYDSG | |
| | | | | SVSDYTLSEIKPLHNILTQLQPFLK | |
| | | | | LKQKQANLVLKIIEQLPSAKESPD | |
| | | | | KFLEVCTWVDQVAALNDSRTRKT | |
| | | | | TSETVRAVLDSLSEKKKSSS | |
| pCLS2638 | SCOH- | 7E24V33C38S44I50R70 | + | MANTKYNEEFLLYLAGFVDGDGS | 611 |
| | HV12-M1- | S75N77R96E105A132V | | IVAQIKPNQSCKFKHSLSLTFIVTQ | |
| | 105A-ME- | _SK19S30R33S44K61R | | KTRRRWFLDKLVDEIGVGYVRDS | |
| | 80K132V | 66H68Y70S77T80K87I | | GSVSNYRLSEIKPLHNFLTQLQPFL | |
| | | 132V139R163S | | ELKQKQANLALKIIEQLPSAKESPD | |
| | | | | KFLEVCTWVDQVAALNDSKTRKT | |
| | | | | TSETVRAVLDSLSEKKKSSPAAGG | |
| | | | | SDKYNQALSKYNQALSKYNQALS | |
| | | | | GGGGSNKKFLLYLAGFVDSDGSII | |
| | | | | AQIKPRQSSKFKHQLSLTFKVTQK | |
| | | | | TQRRWFLDKLVDRIGVGHVYDSG | |
| | | | | SVSDYTLSKIKPLHNILTQLQPFLK | |
| | | | | LKQKQANLVLKIIEQLPSAKESPD | |
| | | | | KFLEVCTWVDQVAALNDSRTRKT | |
| | | | | TSETVRAVLDSLSEKKKSSS | |
| pCLS2639 | SCOH- | 7E24V33C38S44I50R70 | + | MANTKYNEEFLLYLAGFVDGDGS | 612 |
| | HV12-M1- | S75N77R96E105A132V | | IVAQIKPNQSCKFKHSLSLTFIVTQ | |
| | 105A-ME- | _8K19S30R33S44K61R | | KTRRRWFLDKLVDEIGVGYVRDS | |
| | 105A132V | 66H68Y70S77T87I105 | | GSVSNYRLSEIKPLHNFLTQLQPFL | |
| | | A132V139R163S | | ELKQKQANLALKIIEQLPSAKESPD | |
| | | | | KFLEVCTWVDQVAALNDSKTRKT | |
| | | | | TSETVRAVLDSLSEKKKSSPAAGG | |
| | | | | SDKYNQALSKYNQALSKYNQALS | |
| | | | | GGGGSNKKFLLYLAGFVDSDGSII | |
| | | | | AQIKPRQSSKFKHQLSLTFKVTQK | |
| | | | | TQRRWFLDKLVDRIGVGHVYDSG | |
| | | | | SVSDYTLSEIKPLHNILTQLQPFLK | |
| | | | | LKQKQANLALKIIEQLPSAKESPD | |
| | | | | KFLEVCTWVDQVAALNDSRTRKT | |
| | | | | TSETVRAVLDSLSEKKKSSS | |

[0622] d) Results

[0623] The activity of the single chain molecules against the HSV12 target was monitored using the previously described CHO assay along with our internal control SCOH-RAG and I-Sce I meganucleases. All comparisons were done upon DNA dose response of transfected variant DNA. All the single molecules displayed strong cleavage activity of HSV12 target in CHO assay as listed in Table XXXXVIII.

[0624] Variants shared specific behaviour upon assayed dose depending on the mutation profile they bear. For example, pCLS2633 displays a similar activity and profile than I-Sce I (FIG. 42). Its activity reaches the plateau even at 12.5 ng DNA dose. All of the variants described in Table XXXXVIII are active and can be used for the HSV-1 virus RL2 gene targeting and cleavage.

### EXAMPLE 8

### Validation of tHSV1, tHSV2, tHSV4, tHSV8, tHSV9 or tHSV12 Target Cleavage in an Extrachromosomal Model in CHO Cells and Toxicity Evaluation

### 1) Materials and Methods

[0625] Cell Survival Assay

[0626] The CHO cells were used to seed plates at a density of 5000 cells in 96-well plates. The next day, various amounts of meganuclease expression vectors and a constant amount of GFP-encoding plasmid complexed to Polyfect® transfection reagent were used to transfect the cells. GFP levels were monitored on days 1 and 6 after transfection, by flow cytometry. Cell survival is expressed as a percentage and was calculated as a ratio: (meganuclease-transfected cell expressing GFP on day 6/control transfected cell expressing GFP on day 6), corrected for the transfection efficiency determined on day 1.

### 2) Results

[0627] The activity of the anti-HSV meganucleases was characterized in the CHO extrachromosomal assay. We used as positive controls the I-SceI and mRag1 meganucleases. mHSV4 (pCLS2790) (SEQ ID NO:534) and mHSV12 (pCLS2633) (SEQ ID NO:465) displayed very similar levels of activity, matching the activity of 1-SceI and mRag1, and mHSV1 (pCLS2588) (SEQ ID NO:535 or SEQ ID NO:561) proved slightly less active (FIG. 42). However, mHSV2 (pCLS2459), mHSV8 (pCLS3306) (SEQ ID NO:576) and mHSV9 (pCLS3318) (SEQ ID NO:590) displayed a markedly different profile, with maximal activity being observed at a very low dose (0.39 ng), indicative of an extremely active proteins. For comparison, the I-SceI and Rag1 proteins reached approximately the same maximal activity at a 16 times higher dose (6.25 ng) of plasmid. However, at a higher dose (12.5 ng), the activity of mHSV2 decreased (FIG. 42).

[0628] In order to evaluate potential meganuclease toxicity, we used a cell survival assay described by different authors in previous studies. Three meganucleases were used as controls in this assay (FIG. 43): I-SceI, mRag1 and the I-CreI natural endonuclease. We have previously shown that in this type of assay, both I-SceI and mRag1 display little toxicity, an outcome that was confirmed in this experiment. In contrast, a significant toxic effect was observed with I-CreI protein, consistent with what we observed in another assay wherein meganucleases are over-expressed in yeast cells at 37° C. Among the six anti-HSV meganucleases, mHSV1 proved quite innocuous, with its profile mimicking the I-SceI and mRag1 profiles. mHSV2 behaved very similar to I-CreI, while the four other proteins displayed intermediate patterns. These results indicate that mHSV2 can be toxic at high doses (FIG. 43).

### EXAMPLE 9

### Strategy for Engineering Novel Meganucleases Cleaving the HBV12 Target from the Hepatitis B Genome

[0629] HBV12 is a 22 bp (non-palindromic) target located in the coding sequence of the RNA dependent DNA polymerase gene in the Hepatitis B genome. The target sequence corresponds to positions 2828-2850 of the Hepatitis B genome (accession number X70185, FIG. 84).

[0630] The HBV12 sequence is partly a patchwork of the 10ATT_P, 10TAG_P, 5TGG_P and 5_CTT_P targets (FIG. 55) which are cleaved by previously identified meganucleases, obtained as described in International PCT Applications WO 2006/097784 and WO 2006/097853; Arnould et al., J. Mol. Biol., 2006, 355, 443-458; Smith et al., Nucleic Acids Res., 2006. Thus the inventors set out to determine whether HBV12 could be cleaved by combinatorial variants resulting from these previously identified meganucleases.

[0631] The 10ATT_P, 10TAG_P, 5TGG_P and 5_CTT_P target sequences are 24 bp derivatives of C1221, a palindromic sequence cleaved by I-CreI (Arnould et al., precited). However, the structure of I-CreI bound to its DNA target suggests that the two external base pairs of these targets (positions −12 and 12) have no impact on binding and cleavage (Chevalier et al., Nat. Struct. Biol., 2001, 8, 312-316; Chevalier and Stoddard, Nucleic Acids Res., 2001, 29, 3757-3774; Chevalier et al., J. Mol. Biol., 2003, 329, 253-269), and in this study, only positions −11 to 11 were considered. Consequently, the HBV12 series of targets were defined as 22 bp sequences instead of 24 bp. HBV12 differs from C1221 in the 4 bp central region. According to the structure of the I-CreI protein bound to its target, there is no contact between the 4 central base pairs (positions −2 to 2) and the I-CreI protein (Chevalier et al., Nat. Struct. Biol., 2001, 8, 312-316; Chevalier and Stoddard, Nucleic Acids Res., 2001, 29, 3757-3774; Chevalier et al., J. Mol. Biol., 2003, 329, 253-269). Thus, the bases at these positions should not impact the binding efficiency. However, they could affect cleavage, which results from two nicks at the edge of this region. Thus, the gaac sequence in −2 to 2 was first substituted with the gtac sequence from C1221, resulting in target HBV12.2 (FIG. 55). Then, two palindromic targets, HBV12.3 and HBV12.4, were derived from HBV12.2 (FIG. 55). Since HBV12.3 and HBV12.4 are palindromic, they should be cleaved by homodimeric proteins. Thus, proteins able to cleave the HBV12.3 and HBV12.4 sequences as homodimers were first designed (Examples 10 and 11) and then co-expressed to obtain heterodimers cleaving HBV12 (Example 12). Heterodimers cleaving the HBV12 target could be identified. In order to improve cleavage activity for the HBV12 target, a series of variants cleaving HBV12.3 and HBV12.4 was chosen, and then refined. The chosen variants were subjected to random or site-directed mutagenesis, and used to form novel heterodimers that were screened against the HBV12 target (Examples 13, 14 and 15). Strong cleavage activity of the HBV12 target could be observed for these heterodimers.

### EXAMPLE 10

### Identification of Meganucleases Cleaving HBV12.3

[0632] This example shows that I-CreI variants can cut the HBV12.3 DNA target sequence derived from the left part of the HBV12.2 target in a palindromic form (FIG. 55). Target sequences described in this example are 22 bp palindromic sequences. Therefore, they will be described only by the first 11 nucleotides, followed by the suffix _P (For example, target HBV12.3 will be noted tattcttgggt_P).

[0633] HBV12.3 is similar to 10ATT_P at positions ±1, ±2, ±8, ±9, and ±10 and to 5TGG_P at positions ±1, ±2, ±4, ±5 and ±10. It was hypothesized that positions ±6, ±7 and ±11 would have little effect on the binding and cleavage activity. Variants able to cleave the 10ATT_P target were obtained by mutagenesis of I-CreI N75 or D75, at positions 28, 30, 32, 33, 38, 40 and 70, as described previously in Smith et al. Nucleic Acids Res., 2006, 34, e149; International PCT Applications WO 2007/060495 and WO 2007/049156. Variants able to cleave 5TGG_P were obtained by mutagenesis on I-CreI N75 at positions 44, 68, 70, 75 and 77 as described in Arnould et al., J. Mol. Biol., 2006, 355, 443-458; Smith et al. Nucleic Acids Res., 2006, 34, e149; International PCT Applications WO 2006/097784, WO 2006/097853, WO 2007/060495 and WO 2007/049156.

[0634] Both sets of proteins are mutated at position 70. However, the existence of two separable functional subdomains was hypothesized. This implies that this position has little impact on the specificity at bases 10 to 8 of the target.

[0635] Therefore, to check whether combined variants could cleave the HBV12.3 target, mutations at positions 44, 68, 70, 75 and 77 from proteins cleaving 5TGGP were combined with the 28, 30, 32, 33, 38 and 40 mutations from proteins cleaving 10ATT_P.

[0636] A) Material and Methods

[0637] a) Construction of Target Vector

[0638] The target was cloned as follows: an oligonucleotide corresponding to the HBV12.3 target sequence flanked by gateway cloning sequences was ordered from PROLIGO: 5′ tggcatacaagtttatattcttgggtacccaagaatatcaatcgtctgtca 3′ (SEQ ID NO: 620). Double-stranded target DNA, generated by PCR amplification of the single stranded oligonucleotide, was cloned using the Gateway protocol (INVITROGEN) into the yeast reporter vector (pCLS1055, FIG. 4). Yeast reporter vector was transformed into Saccharomyces cerevisiae strain FYBL2-7B (MAT a, ura3Δ851, trp1Δ63, leu2Δ1, lys2Δ202), resulting in a reporter strain.

[0639] b) Mating of Meganuclease Expressing Clones and Screening in Yeast

[0640] I-CreI variants cleaving 10ATT_P or 5TGG_P were previously identified, as described in Smith et al. Nucleic Acids Res., 2006, 34, e149; International PCT Applications WO 2007/060495 and WO 2007/049156, and Arnould et al., J. Mol. Biol., 2006, 355, 443-458; International PCT Applications WO 2006/097784 and WO 2006/097853, respectively for the 10ATT_P and 5TGG_P targets. In order to generate I-CreI derived coding sequences containing mutations from both series, separate overlapping PCR reactions were carried out that amplify the 5′ end (aa positions 1-43) or the 3′ end (positions 39-167) of the I-CreI coding sequence. For both the 5′ and 3′ end, PCR amplification is carried out using primers (Gal10F 5′-gcaactttagtgctgacacatacagg-3′ (SEQ ID NO: 263) or Gal10R 5′-acaaccttgattggagacttgacc-3′(SEQ ID NO: 264)) specific to the vector (pCLS0542, FIG. 5) and primers (assF 5′-ctannnttgaccttt-3′ (SEQ ID NO: 265) or assR 5′-aaaggtcaannntag-3′(SEQ ID NO: 266)), where nnn codes for residue 40, specific to the I-CreI coding sequence for amino acids 39-43. The PCR fragments resulting from the amplification reaction realized with the same primers and with the same coding sequence for residue 40 were pooled. Then, each pool of PCR fragments resulting from the reaction with primers Gal10F and assR or assF and Gal10R was mixed in an equimolar ratio. Finally, approximately 25 ng of each final pool of the two overlapping PCR fragments and 75 ng of vector DNA (pCLS0542, FIG. 6) linearized by digestion with NcoI and EagI were used to transform the yeast Saccharomyces cerevisiae strain FYC2-6A (MATα, trp1Δ63, leu2Δ1, his3Δ200) using a high efficiency LiAc transformation protocol (Gietz and Woods, Methods Enzymol., 2002, 350, 87-96). An intact coding sequence containing both groups of mutations is generated by in vivo homologous recombination in yeast.

[0641] c) Mating of Meganuclease Expressing Clones and Screening in Yeast

[0642] Screening was performed as described previously (Arnould et al., J. Mol. Biol., 2006, 355, 443-458). Mating was performed using a colony gridder (QpixII, GENETIX). Variants were gridded on nylon filters covering YPD plates, using a low gridding density (4-6 spots/cm²). A second gridding process was performed on the same filters to spot a second layer consisting of the reporter-harboring yeast strain for the target of interest. Membranes were placed on solid agar YPD rich medium, and incubated at 30° C. for one night, to allow mating. Next, filters were transferred to synthetic medium, lacking leucine and tryptophan, with galactose (2%) as a carbon source, and incubated for five days at 37° C., to select for diploids carrying the expression and target vectors. After 5 days, filters were placed on solid agarose medium with 0.02% X-Gal in 0.5 M sodium phosphate buffer, pH 7.0, 0.1% SDS, 6% dimethyl formamide (DMF), 7 mM β-mercaptoethanol, 1% agarose and incubated at 37° C., to monitor β-galactosidase activity. Results were analyzed by scanning and quantification was performed using appropriate software.

[0643] d) Sequencing of Variants

[0644] To recover the variant expression plasmids, yeast DNA was extracted using standard protocols and used to transform E. coli. Sequencing of variant ORFs was then performed on the plasmids by MILLEGEN SA. Alternatively, ORFs were amplified from yeast DNA by PCR (Akada et al., Biotechniques, 2000, 28, 668-670), and sequencing was performed directly on the PCR product by MILLEGEN SA.

[0645] B) Results

[0646] I-CreI combinatorial variants were constructed by associating mutations at positions 44, 68, 70, 75 and 77 from proteins cleaving 5TGG_P with the mutations at 28, 30, 32, 33, 38 and 40 from proteins cleaving 10ATT_P on the I-CreI scaffold, resulting in a library of complexity 94. Examples of combinatorial variants are displayed in Table XXXXVIX. This library was transformed into yeast and 2232 clones (23.7 times the diversity) were screened for cleavage against the HBV12.3 DNA target (tattcttgggt_P, SEQ ID NO: 618). Six positive clones were found, which after sequencing turned out to correspond to six different novel endonuclease variants (Table L). Examples of positives are shown in FIG. 56. All six variants display non parental combinations at positions 28, 30, 32, 33, 38, 40 or 44, 68, 70, 75, 77. Such combinations likely result from PCR artifacts during the combinatorial process. Alternatively, the variants may be I-CreI combined variants resulting from micro-recombination between two original variants during in vivo homologous recombination in yeast.

TABLE XXXXVIX
Panel of variants* theoretically present in the combinatorial
library

| Amino | | | | | | | | | | | |
|---|---|---|---|---|---|---|---|---|---|---|---|
| acids at | | | | | | | | | | | |
| positions | | | | | | | | | | | |
| 44, 68, | | | | | | | | | | | |
| 70, | | | | | | | | | | | |
| 75 and | | | | | | | | | | | |
| 77 | | | | | | | | | | | |
| (ex: | | | | | | | | | | | |
| DYSSR | | | | | | | | | | | |
| stands for | | | | | | | | | | | |
| D44, Y68, | | | | | | | | | | | |
| S70, | Amino acids at positions 28, 30, 32, 33, 38 and 40 | | | | | | | | | | |
| S75 and | (ex: KDSRQS stands for K28, D30, S32, R33, Q38 and S40) | | | | | | | | | | |
| R77) | KDSRQS | KSSNQS | KSSCQS | KNNGQS | KNTYAS | KNDYGS | KQSTQS | KNDYCS | KNSNTS | KCSGQS | KNSCAS |
| DYSSR | | | | | | | | | | | |
| YRSYV | | | | | | | | | | | |

*Only 22 out of the 94 combinations are displayed. None of them were identified in the positive clones.

TABLE L
I-CreI variants capable of cleaving the HBV12.3
DNA target.

| Amino acids at positions 28, 30, 32, | |
|---|---|
| 33, 38, 40/44, 68, 70, 75 and 77 | |
| of the I-CreI variants | |
| (ex: KSRSQS/DYSSR stands for | SEQ |
| K28, S30, R32, S33, Q38, S40/D44, | ID |
| Y68, S70, S75 and R77) | NO: |
| KSRSQS/DYSSR | 621 |
| KNQYCS/DYSSR | 622 |
| KNKTQS/DYSSR | 623 |
| KRYSQS/DYSSR | 624 |
| KSSNQS/DYSSR + 66H | 625 |
| KNAAGS/DYSSR + 89A | 626 |

### EXAMPLE 11

### Identification of Meganucleases Cleaving HBV12.4

[0647] This Example shows that I-CreI variants can cleave the HBV12.4 DNA target sequence derived from the right part of the HBV12.2 target in a palindromic form (FIG. 55). All target sequences described in this example are 22 bp palindromic sequences. Therefore, they will be described only by the first 11 nucleotides, followed by the suffix _P (for example, HBV12.4 will be called gtagctcttgt_P).

[0648] HBV12.4 is similar to 5CTT_P at positions ±1, ±2, ±3, ±4, ±5 and ±9 and to 10TAG_P at positions ±1, ±2, ±4, ±8, ±9 and ±10. It was hypothesized that positions ±6, ±7 and ±11 would have little effect on the binding and cleavage activity. Variants able to cleave 5CTT_P were obtained by mutagenesis of I-CreI N75 at positions 24, 44, 68, 70, 75 and 77, as described previously (Arnould et al., J. Mol. Biol., 2006, 355, 443-458; Smith et al. Nucleic Acids Res., 2006, 34, e149; International PCT Applications WO 2006/097784, WO 2006/097853, WO 2007/060495 and WO 2007/049156). Variants able to cleave the 10TAG_P target were obtained by mutagenesis of I-CreI N75 or D75, at positions 28, 30, 32, 33, 38 and 40, as described previously in Smith et al. Nucleic Acids Res., 2006, 34, e149; International PCT Applications WO 2007/060495 and WO 2007/049156.

[0649] Mutations at positions 24 found in variants cleaving the 5CTT_P target will be lost during the combinatorial process. But it was hypothesized that this will have little impact on the capacity of the combined variants to cleave the HBV12.4 target.

[0650] Therefore, to check whether combined variants could cleave the HBV12.4 target, mutations at positions 44, 68, 70, 75 and 77 from proteins cleaving 5CTT_P were combined with the 28, 30, 32, 33, 38 and 40 mutations from proteins cleaving 10TAG_P.

[0651] A) Material and Methods

[0652] a) Construction of Target Vector

[0653] The experimental procedure is as described in Example 10, with the exception that an oligonucleotide corresponding to the HBV12.4 target sequence was used: 5′ tggcatacaagtttgtagctcttgtacaagagctacacaatcgtctgtca 3′ (SEQ ID NO: 803).

[0654] b) Construction of Combinatorial Variants

[0655] I-CreI variants cleaving 10TAG_P or 5CTT_P were previously identified, as described in Smith et al. Nucleic Acids Res., 2006, 34, e149; International PCT Applications WO 2007/060495 and WO 2007/049156, and Arnould et al., J. Mol. Biol., 2006, 355, 443-458; International PCT Applications WO 2006/097784 and WO 2006/097853, respectively for the 10TAG_P and 5CTT_P targets. In order to generate I-CreI derived coding sequences containing mutations from both series, separate overlapping PCR reactions were carried out that amplify the 5′ end (aa positions 1-43) or the 3′ end (positions 39-167) of the I-CreI coding sequence. For both the 5′ and 3′ end, PCR amplification is carried out using primers (Gal10F 5′-gcaactttagtgctgacacatacagg-3′ (SEQ ID NO: 263) or Gal10R 5′-acaaccttgattggagacttgacc-3′ (SEQ ID NO: 264)) specific to the vector (pCLS1107, FIG. 6) and primers (assF 5′-ctannnttgaccttt-3′ (SEQ ID NO: 265) or assR 5′-aaaggtcaannntag-3′(SEQ ID NO: 266)), where nnn codes for residue 40, specific to the I-CreI coding sequence for amino acids 39-43. The PCR fragments resulting from the amplification reaction realized with the same primers and with the same coding sequence for residue 40 were pooled. Then, each pool of PCR fragments resulting from the reaction with primers Gal10F and assR or assF and Gal10R was mixed in an equimolar ratio. Finally, approximately 25 ng of each final pool of the two overlapping PCR fragments and 75 ng of vector DNA (pCLS1107, FIG. 6) linearized by digestion with DraIII and NgoMIV were used to transform the yeast Saccharomyces cerevisiae strain FYC2-6A (MATα, trp1Δ63, leu2Δ1, his3Δ200) using a high efficiency LiAc transformation protocol (Gietz and Woods, Methods Enzymol., 2002, 350, 87-96). An intact coding sequence containing both groups of mutations is generated by in vivo homologous recombination in yeast.

[0656] c) Mating of Meganuclease Expressing Clones and Screening in Yeast

[0657] Screening was performed as described previously (Arnould et al., J. Mol. Biol., 2006, 355, 443-458). Mating was performed using a colony gridder (QpixII, GENETIX). Variants were gridded on nylon filters covering YPD plates, using a low gridding density (4-6 spots/cm²). A second gridding process was performed on the same filters to spot a second layer consisting of the reporter-harboring yeast strain for the target of interest. Membranes were placed on solid agar YPD rich medium, and incubated at 30° C. for one night, to allow mating. Next, filters were transferred to synthetic medium, lacking tryptophan, including G418, with galactose (2%) as a carbon source, and incubated for five days at 37° C., to select for diploids carrying the expression and target vectors. After 5 days, filters were placed on solid agarose medium with 0.02% X-Gal in 0.5 M sodium phosphate buffer, pH 7.0, 0.1% SDS, 6% dimethyl formamide (DMF), 7 mM β-mercaptoethanol, 1% agarose, and incubated at 37° C., to monitor β-galactosidase activity. Results were analyzed by scanning and quantification was performed using appropriate software.

[0658] d) Sequencing of Variants

[0659] Experimental procedure is as described in example 10.

[0660] B) Results

[0661] I-CreI combinatorial variants were constructed by associating mutations at positions 44, 68, 70, 75 and 77 from proteins cleaving 5CTT_P with the mutations 28, 30, 32, 33, 38 and 40 from proteins cleaving 10TAG_P on the I-CreI scaffold, resulting in a library of complexity 720. Examples of combinatorial variants are displayed in Table LI. This library was transformed into yeast and 2232 clones (3.1 times the diversity) were screened for cleavage against the HBV12.4 DNA target (gtagctcttgt_P, SEQ ID NO: 619). A total of 664 positive clones were found to cleave HBV12.4. Sequencing and validation by secondary screening of 93 of the I-CreI variants resulted in the identification of 51 different novel endonucleases. Examples of positives are shown in FIG. 58. The sequence of several of the variants identified display non parental combinations at positions 28, 30, 32, 33, 38, 40 or 44, 68, 70, 75, 77 as well as additional mutations (see Examples Table LII). Such variants likely result from PCR artifacts during the combinatorial process. Alternatively, the variants may be I-CreI combined variants resulting from micro-recombination between two original variants during in vivo homologous recombination in yeast.

TABLE LI
Panel of variants* theoretically present in the combinatorial library

| Amino acids at | | | | | | | | | | |
|---|---|---|---|---|---|---|---|---|---|---|
| positions 44, 68, 70, | | | | | | | | | | |
| 75 and 77 | | | | | | | | | | |
| (ex: RYSDN stands | Amino acids at positions 28, 30, 32, 33, 38 and 40 | | | | | | | | | |
| for R44, Y68, S70, D75 | (ex: KNNCQS stands for K28, N30, N32, C33, Q38 and S40) | | | | | | | | | |
| and N77) | KNNCQS | KNRCQS | KNSGQS | KNSCQS | KNHAQS | KNGPQS | KNTCQS | KNGCQS | KNEAQS | KNHSQS |
| RYSDN | + | + | | | | | | + | | |
| KTSDR | + | | | | | | | | | |
| RYSYN | + | + | | | | | | + | | |
| KESNR | | | | | | | | | | |
| RYSDQ | | + | | | | | | + | | + |
| QASQR | | | | | | | | | | |
| RNSNN | | | | | | | | | | |
| RYSNN | + | + | | | | | | + | | |
| RYSYI | | | | | | | | | | |
| RNSDR | | | | | | | | | | |
| KASDK | | | | | | | | | | |
| KESDR | | | | | | | | | | |
| RYSNI | | | | | | | | | | |
| KSSDI | | | | | | | | | | |
| RASDR | | | | | | | | | | |
| RTSNN | | | | | | | | | | |
| QNSQR | | | | | | | | | | |
| QESNR | | | | | | | | | | |
| QRSQR | | | | | | | | | | |
| QSSNR | | | | | | | | | | |
| RSSNN | | | | | | | | + | | |
| KASDV | | | | | | | | | | |

*Only 220 out of the 720 combinations are dispayed.
+ indicates that a functional combinatorial variantcleaving the HBV12.4 target was found among the identified positives.

TABLE LII
I-CreI variants with additional mutations capable
of cleaving the HBV12.4 DNA target.

| Amino acids at positions 28, 30, 32, | |
|---|---|
| 33, 38, 40/44, 68, 70, 75 and 77 | |
| of the I-CreI variants | |
| (ex: KRGYQS/KYSNI stands for | SEQ |
| K28, R30, G32, Y33, Q38, S40/ | ID |
| K44, Y68, S70, N75 and I77) | NO: |
| KNHCQS/RYSYN | 628 |
| KNHCQS/RYSNQ + 117K | 629 |
| KNHCQS/RYSNQ | 630 |
| KNHCQS/RYSNN | 631 |
| KNHCQS/RYSDQ + 151A | 632 |
| KNHCQS/RYSDQ | 633 |

### EXAMPLE 12

### Making of Meganucleases Cleaving HBV12

[0662] I-CreI variants able to cleave each of the palindromic HBV12.2 derived targets (HBV12.3 and HBV12.4) were identified in Example 10 and Example 11. Pairs of such variants (one cutting HBV12.3 and one cutting HBV12.4) were co-expressed in yeast. Upon co-expression, there should be three active molecular species, two homodimers, and one heterodimer. It was assayed whether the heterodimers that should be formed, cut the non palindromic HBV12 target, which differs from the HBV12.2 sequence by 2 bp at positions 1 and 2.

[0663] A) Materials and Methods

[0664] a) Construction of Target Vector

[0665] The experimental procedure is as described in Example 2, with the exception that an oligonucleotide corresponding to the HBV12 target sequence: 5′ tggcatacaagtttatattcttgggaacaagagctacacaatcgtctgtca 3′ (SEQ ID NO: 633) was used.

[0666] b) Co-Expression of Variants

[0667] Yeast DNA was extracted from variants cleaving the HBV12.3 target (pCLS542 expression vector) as well as those cleaving the HBV12.4 target (pCLS1107 expression vector) using standard protocols and were used to transform E. coli. Plasmid DNA derived from a HBV12.3 variant and a HBV12.4 variant was then co-transformed into the yeast Saccharomyces cerevisiae strain FYC2-6A (MATα, trp1Δ63, leu2Δ1, his3Δ200) using a high efficiency LiAc transformation protocol (Gietz and Woods, Methods Enzymol., 2002, 350, 87-96). Transformants were selected on synthetic medium lacking leucine and containing G418.

[0668] c) Mating of Meganuclease Co-Expressing Clones and Screening in Yeast

[0669] Mating was performed using a colony gridder (QpixII, Genetix).

[0670] Variants were gridded on nylon filters covering YPD plates, using a low gridding density (4-6 spots/cm²). A second gridding process was performed on the same filters to spot a second layer consisting of the reporter-harboring yeast strain for the target of interest. Membranes were placed on solid agar YPD rich medium, and incubated at 30° C. for one night, to allow mating. Next, filters were transferred to synthetic medium, lacking leucine and tryptophan, including G418, with galactose (2%) as a carbon source, and incubated for five days at 37° C., to select for diploids carrying the expression and target vectors. After 5 days, filters were placed on solid agarose medium with 0.02% X-Gal in 0.5 M sodium phosphate buffer, pH 7.0, 0.1% SDS, 6% dimethyl formamide (DMF), 7 mM β-mercaptoethanol, 1% agarose, and incubated at 37° C., to monitor β-galactosidase activity. Results were analyzed by scanning and quantification was performed using appropriate software.

[0671] B) Results

[0672] Co-expression of variants cleaving the HBV12.4 target (7 variants chosen among those described in Table LI and Table LII) and the six variants cleaving the HBV12.3 target (described in Table L) resulted in weak cleavage of the HBV12 target in certain cases (FIG. 58). Functional combinations are summarized in Table LIII.

TABLE LIII
Cleavage of the HBV12 target by the heterodimeric variants

| | Amino acids at positions 28, 30, 32, 33, 38, 40/44, 68, 70, 75 | | | | | |
|---|---|---|---|---|---|---|
| | and 77 of the I-CreI variants cleaving the HBV12.3 target | | | | | |
| Amino adds at positions 28, 30, | (ex: KRYSQS/DYSSR stands for K28, R30, Y32, S33, Q38, S40/D44, | | | | | |
| 32, 33, 38, 40/44, 68, 70, 75 and | Y68, S70, S75 and R77) | | | | | |
| 77 of I-CreI variants cleaving the | KRYSQS/ | KSRSQS/ | KNAAGS/ | KSSNQS/ | KNQYCS/ | KNKTQS/ |
| HBV12.4 target (ex: KNNCQS/RYSYN | DYSSR | DYSSR | DYSSR + 89A | DYSSR + 66H | DYSSR | DYSSR |
| stands for K28 N30, N32, C33, Q38, | (SEQ ID NO: | (SEQ ID NO: | (SEQ ID NO: | (SEQ ID NO: | (SEQ ID NO: | (SEQ ID NO: |
| S40/R44, Y68, S70, Y75 and N77) | 624) | 621) | 625) | 624) | 622) | 623) |
| KNNCQS/ | +* | +* | | +* | | |
| RYSYN | | | | | | |
| (SEQ ID NO: 634) | | | | | | |
| KNHCQS/ | +* | +* | | +* | | |
| RYSYN | | | | | | |
| (SEQ ID NO: | | | | | | |
| 627) | | | | | | |
| KNHCQS/ | | +* | | +* | | |
| RYSNQ + 117K | | | | | | |
| (SEQ ID NO: | | | | | | |
| 628) | | | | | | |
| KNHCQS/ | +* | +* | | +* | | |
| RYSNQ | | | | | | |
| (SEQ ID NO: | | | | | | |
| 629) | | | | | | |
| KNHCQS/ | | | | | | |
| RYSNN | | | | | | |
| (SEQ ID NO: | | | | | | |
| 630) | | | | | | |
| KNHCQS/ | +* | +* | | +* | | |
| RYSDQ + 151A | | | | | | |
| (SEQ ID NO: | | | | | | |
| 631) | | | | | | |
| KNHCQS/ | | +* | | +* | | |
| RYSDQ | | | | | | |
| (SEQ ID NO: | | | | | | |
| 632) | | | | | | |

+indicates a functional combination
*indicates that the combination weakly cuts the HBV12 target.

### EXAMPLE 13

### Improvement of Meganucleases Cleaving HBV12 by Random Mutagenesis of Proteins Cleaving HBV12.3 and Assembly with Proteins Cleaving HBV12.4

[0673] I-CreI variants able to cleave the HBV12 target by assembly of variants cleaving the palindromic HBV12.3 and HBV12.4 target have been previously identified in Example 12. However, these variants display weak activity with the HBV12 target.

[0674] Therefore five combinatorial variants cleaving HBV12.3 were mutagenized, and variants were screened for cleavage activity of HBV12 when co-expressed with a variant cleaving HBV12.4. According to the structure of the I-CreI protein bound to its target, there is no contact between the 4 central base pairs (positions −2 to 2) and the I-CreI protein (Chevalier et al., Nat. Struct. Biol., 2001, 8, 312-316; Chevalier and Stoddard, Nucleic Acids Res., 2001, 29, 3757-3774; Chevalier et al., J. Mol. Biol., 2003, 329, 253-269). Thus, it is difficult to rationally choose a set of positions to mutagenize, and mutagenesis was performed on the whole protein. Random mutagenesis results in high complexity libraries. Therefore, to limit the complexity of the variant libraries to be tested, only one of the two components of the heterodimers cleaving HBV12 was mutagenized.

[0675] Thus, in a first step, proteins cleaving HBV12.3 were mutagenized, and in a second step, it was assessed whether they could cleave HBV12 when co-expressed with a protein cleaving HBV12.4.

[0676] A) Material and Methods

[0677] a) Construction of Libraries by Random Mutagenesis

[0678] Random mutagenesis was performed on a pool of chosen variants, by PCR using Mn²⁺. PCR reactions were carried out that amplify the I-CreI coding sequence using the primers preATGCreFor (5′-gcataaattactatacttctatagacacgcaaacacaaatacacagcggccttgccacc-3′; SEQ ID NO: 169) and ICreIpostRev (5′-ggctcgaggagctcgtctagaggatcgctcgagttatcagtcggccgc-3′; SEQ ID NO: 170), which are common to the pCLS0542 (FIG. 5) and pCLS1107 (FIG. 6) vectors. Approximately 25 ng of the PCR product and 75 ng of vector DNA (pCLS0542) linearized by digestion with NcoI and EagI were used to transform the yeast Saccharomyces cerevisiae strain FYC2-6A (MATα, trp1Δ63, leu2Δ1, his3Δ200) using a high efficiency LiAc transformation protocol (Gietz and Woods, Methods Enzymol., 2002, 350, 87-96). Expression plasmids containing an intact coding sequence for the I-CreI variant were generated by in vivo homologous recombination in yeast.

[0679] b) Variant-Target Yeast Strains, Screening and Sequencing

[0680] The yeast strain FYBL2-7B (MATα, ura3Δ851, trp1Δ63, leu2Δ1, lys2Δ202) containing the HBV12 target in the yeast reporter vector (pCLS1055, FIG. 4) was transformed with variants, in the kanamycin vector (pCLS1107), cutting the HBV12.4 target, using a high efficiency LiAc transformation protocol. Variant-target yeast strains were used as target strains for mating assays as described in Example 12. Positives resulting clones were verified by sequencing (MILLEGEN) as described in Example 10.

[0681] B) Results

[0682] Five variants cleaving HBV12.3 (I-CreI 30R,32Y,33S,44D,68Y,70S,75S,77R, I-CreI 30S,32R,33S,44D,68Y,70S,75S,77R, I-CreI 32A,33A,38G,44D,68Y,70S,75S,77R,89A, I-CreI 32Q,38C,44D,68Y,70S,75S,77R and I-CreI 32K,33T,44D,68Y,70S,75S,77R, also called KRYSQS/DYSSR (SEQ ID NO: 624), KSRSQS/DYSSR (SEQ ID NO: 621), KNAAGS/DYSSR+89A (SEQ ID NO: 626), KNQYCS/DYSSR (SEQ ID NO: 622) and KNKTQS/DYSSR (SEQ ID NO: 623) respectively, according to the nomenclature of Table L, were pooled, randomly mutagenized and transformed into yeast. 2232 transformed clones were then mated with a yeast strain that contains (i) the HBV12 target in a reporter plasmid (ii) an expression plasmid containing a variant that cleaves the HBV12.4 target (I-CreI 32H,33C,44R,68Y,70S,75N,77Q or KNHCQS/RYSNQ (SEQ ID NO: 628) according to the nomenclature of Table LII After mating with this yeast strain, 156 clones were found to cleave the HBV12 target more efficiently than the original variant. Thus, 156 positives contained proteins able to form heterodimers with KNHCQS/RYSNQ with an improved cleavage activity for the HBV12 target. An example of positives is shown in FIG. 59. Sequencing of the strongest 93 positive clones indicates that 29 distinct variants were identified (Examples listed in Table LIV).

TABLE LIV
Functional variant combinations displaying
improved cleavage activity for HBV12.

| | Optimized* Variants HBV12.3 |
|---|---|
| VARIANT HBV12.4 | (SEQ ID NO: 635 to 647) |
| I-CreI 28K 30N 32H | 24F 32Q 38C 44D 68Y 70S 75S 77R |
| 33C 38Q 40S 44R | 30R 32Y 33S 44D 64A 68Y 70S 75S |
| 68Y 70S 75N 77Q | 77R |
| (KNHCQS/RYSNQ) | 30S 32H 33S 44D 68Y 70S 75S 77R |
| (SEQ ID NO: 628) | 30S 32R 33S 44D 68Y 70S 72P 75S |
| | 77R 81V |
| | 7E 30S 32R 33S 44D 68Y 70S 75S |
| | 77R |
| | 30S 32R 33S 44D 68Y 70S 75S 77R |
| | 107R |
| | 30S 32R 33S 44D 68Y 70S 75S 77R |
| | 153G |
| | 30S 32R 33S 44D 68Y 70S 75S 77R |
| | 81T 160E |
| | 30S 32R 33S 44D 68Y 70S 75S 77R |
| | 81V 162P |
| | 30S 32R 33S 44D 68Y 70S 75S 77R |
| | 89A |
| | 30S 32R 33S 44D 68Y 70S 75S 77R |
| | 99R |
| | 32G 38G 44D 64A 68Y 70S 75S 77R |
| | 89A |
| | 32G 38G 44D 68Y 70S 75S 77R |
| | 32G 38G 44D 68Y 70S 75S 77R 81T |
| | 32Q 38C 44D 68Y 70S 75S 77R 80A |
| | 32R 33S 44D 68Y 70S 75S 76F 77R |
| | 32R 38C 44D 68Y 70S 75S 77R 109V |
| | 157K |

*Mutations resulting from random mutagenesis are in bold.

### EXAMPLE 14

### Improvement of Meganucleases Cleaving HBV12 by Site-Directed Mutagenesis of Proteins Cleaving HBV12.3 and Assembly with Proteins Cleaving HBV12.4

[0683] The optimized I-CreI variants cleaving HBV12.3 described in Table LIV that resulted from random mutagenesis as described in Example 13 were further mutagenized by introducing selected amino-acid substitutions in the proteins and screening for more efficient variants cleaving HBV12 in combination with a variant cleaving HBV12.4.

[0684] Six amino-acid substitutions have been found in previous studies to enhance the activity of I-CreI derivatives: these mutations correspond to the replacement of Glycine 19 with Serine (G19S), Phenylalanine 54 with Leucine (F54L), Glutamic acid 80 with Lysine (E80K), Phenylalanine 87 with Leucine (F87L), Valine 105 with Alanine (V105A) and Isoleucine 132 with Valine (I132V). These mutations were introduced into the coding sequence of proteins cleaving HBV12.3, and the resulting proteins were tested for their ability to induce cleavage of the HBV12 target, upon co-expression with a variant cleaving HBV12.4.

[0685] A) Material and Methods

[0686] a) Site-Directed Mutagenesis

[0687] A site-directed mutagenesis library was created by PCR on a pool of chosen variants. For example, to introduce the G19S substitution into the coding sequence of the variants, two separate overlapping PCR reactions were carried out that amplify the 5′ end (residues 1-24) or the 3′ end (residues 14-167) of the I-CreI coding sequence. For both the 5′ and 3′ end, PCR amplification is carried out using a primer with homology to the vector (Gal10F 5′-gcaactttagtgctgacacatacagg-3′ (SEQ ID NO: 263) or Gal10R 5′-acaaccttgattggagacttgacc-3′(SEQ ID NO: 264)) and a primer specific to the I-CreI coding sequence for amino acids 14-24 that contains the substitution mutation G19S (G19SF 5′-gccggctttgtggactctgacggtagcatcatc-3′ (SEQ ID NO: 653) or G19SR 5′-gatgatgctaccgtcagagtccacaaagccggc-3′(SEQ ID NO: 654)). The resulting PCR products contain 33 bp of homology with each other. The PCR fragments were purified.

[0688] The same strategy was used with the following pairs of oligonucleotides to introduce the F54L, E80K, F87L, V105A and I132V substitutions, respecLively:
[0689] F54LF: 5′-acccagcgcegttggctgctggacaaactagtg-3′ and F54LR: 5′-cactagtttgtccagcagccaacggcgctgggt-3′ (SEQ ID NO: 655 and 656);
[0690] E80KF: 5′-ttaagcaaaatcaagccgctgcacaacttcctg-3′ and E80KR: 5′-caggaagttgtgcagcggcttgattagcttaa-3′ (SEQ ID NO: 657 and 658);
[0691] F87LF: 5′-aagccgctgcacaacctgctgactcaactgcag-3′ and F87LR: 5′-ctgcagttgagtcagcaggttgtgcagcggctt-3′ (SEQ ID NO: 659 and 660);
[0692] V105AF: 5′-aaacaggcaaacctggctctgaaaattatcgaa-3′ and V105AR: 5′-ttcgataatatttcagagccaggtttgcctgttt-3′ (SEQ ID NO: 661 and 662);
[0693] I132VF: 5′-acctgggtggatcaggttgcagctctgaacgat-3′ and I132VR: 5′-atcgttcagagctgcaacctgatccacccaggt-3′ (SEQ ID NO: 663 and 664).

[0694] The two overlapping PCR fragments for each of the six site-directed mutations were pooled and a total of approximately 25 ng was combined with 75 ng of vector DNA (pCLS0542, FIG. 5) linearized by digestion with NcoI and EagI. The DNA was then used to transform the yeast Saccharomyces cerevisiae strain FYC2-6A (MATα, trp1Δ63, leu2Δ1, his3Δ200) using a high efficiency LiAc transformation protocol (Gietz and Woods, Methods Enzymol., 2002, 350, 87-96). Intact coding sequences containing the one or more of the above described site directed substitutions are generated by in vivo homologous recombination in yeast.

[0695] c) Mating of Meganuclease Expressing Clones and Screening in Yeast

[0696] The experimental procedure is as described in Example 13.

[0697] d) Sequencing of Variants

[0698] The experimental procedure is as described in Example 10.

[0699] B) Results

[0700] A library containing site-directed mutations (G19S, F54L, E80K, F87L, V105A, I132V) was constructed from a pool of 7 variants cleaving HBV12.3 (32Q,38C,44D,68Y,70S,75S,77R,80A, 24F,32Q,38C,44D,68Y,70S,75S,77R, 30S,32R,33 S,44D,68Y,70S,75 S,77R,81V,162P, 30S,32R,33S,44D,68Y,70S,75S,77R,153G, 32R,33S,44D,68Y,70S,75S,76F,77R, 7E,30S,32R,33S,44D,68Y,70S,75S,77R and 30S,32H,33S,44D,68Y,70S,75S,77R according to the nomenclature of Table VI). The library was transformed into yeast and 1674 individual clones were picked and mated with a yeast strain that contains (i) the HBV12 target in a reporter plasmid (ii) an expression plasmid containing a variant that cleaves the HBV12.4 target (32H,33C,44R,68Y,70S,75N,77Q or KNHCQS/RYSNQ) according to the nomenclature of Table LIT).

[0701] After mating with this yeast strain, 122 clones were found to cleave the HBV12 target more efficiently than the original variants. An example of positives is shown in FIG. 60. The sequence of eight of the best I-CreI variants cleaving the HBV12 target when forming a heterodimer with the KNHCQS/RYSNQ variant are listed in Table LV.

TABLE LV
Functional variant combinations displaying strong
cleavage activity for HBV12.

| | Optimized* Variants HBV12.3 |
|---|---|
| VARIANT HBV12.4 | (SEQ ID NO: 665 to 671) |
| I-CreI 28K 30N 32H | 24F 32Q 38C 44D 68Y 70S 75S 77R |
| 33C 38Q 40S 44R | 87L 153G |
| 68Y 70S 75N 77Q | 24F 32Q 38C 44D 68Y 70S 75S 77R |
| (KNHCQS/RYSNQ) | 132V |
| (SEQ ID NO: 630) | 19S 32Q 38C 44D 68Y 70S 75S 77R |
| | 81V |
| | 7E 24F 32Q 38C 44D 68Y 70S 75S |
| | 77R 80K |
| | 24F 32Q 38C 44D 68Y 70S 75S 77R |
| | 80K |
| | 24F 32Q 38C 44D 68Y 70S 75S 77R |
| | 80K 132V |
| | 24F 32Q 38C 44D 68Y 70S 75S 77R |
| | 105A 132V |
| | 32Q 38C 44D 68Y 70S 75S 77R 80A |
| | 153G |

*Mutations resulting from site-directed mutagenesis are in bold.

### EXAMPLE 15

### Improvement of Meganucleases Cleaving HBV12 by Site-Directed Mutagenesis of Proteins Cleaving HBV12.4 and Assembly with Proteins Cleaving HBV12.3

[0702] The initial I-CreI variants cleaving HBV12.4 described in Tables LI and LII were mutagenized by introducing selected amino-acid substitutions in the proteins and screening for more efficient variants cleaving HBV12 in combination with a variant cleaving HBV12.3.

[0703] Six amino-acid substitutions have been found in previous studies to enhance the activity of I-CreI derivatives: these mutations correspond to the replacement of Glycine 19 with Serine (G19S), Phenylalanine 54 with Leucine (F54L), Glutamic acid 80 with Lysine (E80K), Phenylalanine 87 with Leucine (F87L), Valine 105 with Alanine (V105A) and Isoleucine 132 with Valine (I132V). These mutations were introduced into the coding sequence of proteins cleaving HBV12.4, and the resulting proteins were tested for their ability to induce cleavage of the HBV12 target, upon co-expression with a variant cleaving HBV12.3.

[0704] A) Material and Methods

[0705] a) Site-Directed Mutagenesis

[0706] A site-directed mutagenesis library was created by PCR on a pool of chosen variants. For example, to introduce the G19S substitution into the coding sequence of the variants, two separate overlapping PCR reactions were carried out that amplify the 5′ end (residues 1-24) or the 3′ end (residues 14-167) of the I-CreI coding sequence. For both the 5′ and 3′ end, PCR amplification is carried out using a primer with homology to the vector (Gal10F 5′-gcaactttagtgctgacacatacagg-3′ (SEQ ID NO: 263) or Gal10R 5′-acaaccttgattggagacttgacc-3′(SEQ ID NO: 264) and a primer specific to the I-CreI coding sequence for amino acids 14-24 that contains the substitution mutation G19S (G19SF 5′-gccggctttgtggactctgacggtagcatcatc-3′ (SEQ ID NO: 654) or G19SR 5′-gatgatgctaccgtcagagtccacaaagccggc-3′(SEQ ID NO: 655)). The resulting PCR products contain 33 bp of homology with each other. The PCR fragments were purified.

[0707] The same strategy was used with the following pairs of oligonucleotides to introduce the F54L, E80K, F87L, V105A and I132V substitutions, respectively:

(SEQ ID NO: 655 and 656)

| | |
|---|---|
| *F54LF: | 5′-acccagcgccgttggctgctggacaaactagtg-3′ |
| and | |
| F54LR: | 5′-cactagtttgtccagcagccaacggcgctgggt-3′; |

(SEQ ID NO: 657 and 658)

| | |
|---|---|
| *E80KF: | 5′-ttaagcaaaatcaagccgctgcacaacttcctg-3′ |
| and | |
| E80KR: | 5′-caggaagttgtgcagcggcttgattttgcttaa-3′; |

(SEQ ID NO: 659 and 660)

| | |
|---|---|
| *F87LF: | 5′-aagccgctgcacaacctgctgactcaactgcag-3′ |
| and | |
| F87LR: | 5′-ctgcagttgagtcagcaggttgtgcagcggctt-3′; |

(SEQ ID NO: 661 and 662)

| | |
|---|---|
| *V105AF: | 5′-aaacaggcaaacctggctctgaaaattatcgaa-3′ |
| and | |
| V105AR: | 5′-ttcgataattacagagccaggtttgcctgttt-3′; |

(SEQ ID NO: 663 and 664)

| | |
|---|---|
| *I132VF: | 5′-acctgggtggatcaggttgcagctctgaacgat-3′ |
| and | |
| I132VR: | 5′-atcgttcagagctgcaacctgatccacccaggt-3′. |

[0708] The two overlapping PCR fragments for each of the six site-directed mutations were pooled and a total of approximately 25 ng was combined with 75 ng of vector DNA (pCLS1107, FIG. 6) linearized by digestion with DraIII and NgoMIV. The DNA was then used to transform the yeast Saccharomyces cerevisiae strain FYC2-6A (MATα, trp1Δ63, leu2Δ1, his3Δ200) using a high efficiency LiAc transformation protocol (Gietz and Woods, Methods Enzymol., 2002, 350, 87-96). Intact coding sequences containing one or more of the above described site directed substitutions are generated by in vivo homologous recombination in yeast.

[0709] c) Mating of Meganuclease Expressing Clones and Screening in Yeast

[0710] The experimental procedure is as described in Example 13.

[0711] d) Sequencing of Variants

[0712] The experimental procedure is as described in Example 10.

[0713] B) Results

[0714] A library containing site-directed mutations (G19S, F54L, E80K, F87L, V105A, I132V) was constructed from a pool of 7 variants cleaving HBV12.4 (32N,33C,44R,68Y,70S,75Y,77N, 32H,33C,44R,68Y,70S,75Y,77N, 32H,33C,44R,68Y,70S,75N,77Q,117K, 32H,33C,44R,68Y,70S,75N,77Q, 32H,33C,44R,68Y,70S,75N,77N, 32H,33C,44R,68Y,70S,75D,77Q,151A and 32H,33C,44R,68Y,70S,75D,77Q, also called KNNCQS/RYSYN (SEQ ID NO: 634), KNHCQS/RYSYN (SEQ ID NO: 628), KNHCQS/RYSNQ+117K (SEQ ID NO: 629), KNHCQS/RYSNQ (SEQ ID NO: 630), KNHCQS/RYSNN (SEQ ID NO: 631), KNHCQS/RYSDQ+151A (SEQ ID NO: 632) and KNHCQS/RYSDQ (SEQ ID NO: 633), respectively, according to the nomenclature of Table LI and Table LII). The library was transformed into yeast and 1116 individual clones were picked and mated with a yeast strain that contains (i) the HBV12 target in a reporter plasmid (ii) an expression plasmid containing a variant that cleaves the HBV12.3 target (30S,32R,33S,44D,68Y,70S,75S,77R or KSRSQS/DYSSR (SEQ ID NO: 621) according to the nomenclature of Table L).

[0715] After mating with this yeast strain, >200 clones were found to cleave the HBV12 target more efficiently than the original variants. An example of positives is shown in FIG. 61. The sequence of seven of the best I-CreI variants cleaving the HBV12 target when forming a heterodimer with the KSRSQS/DYSSR variant are listed in Table LVI.

TABLE LVI
Functional variant combinations displaying strong
cleavage activity for HBV12.

| | Optimized* Variants HBV12.4 |
|---|---|
| VARIANT HBV12.3 | (SEQ ID NO: 672 to 678) |
| I-CreI 28K 30S 32R | 32H 33C 40R 44R 68Y 70S 75N 77Q |
| 33S 38Q 40S 44D 68V | 19S 32H 33C 44R 68Y 70S 75D 77R |
| 70S 75S 77R | 32H 33C 44R 68Y 70S 75Y 77Q 87L |
| (KSRSQS/DYSSR) | 32H 33C 44R 68Y 70S 75D 77N 80K |
| | 32H 33C 44R 68Y 70S 75D 77Q 87L |
| | 105A 151A |
| | 32H 33C 44R 54L 68Y 70S 75D 77Q |
| | 32H 33C 44R 68Y 70S 75D 77Q 87L |
| | 117K |

*Mutations resulting from site-directed mutagenesis are in bold.

### EXAMPLE 16

### Strategy for Engineering Novel Meganucleases Cleaving the HBV8 Target from the Hepatitis B Genome

[0716] HBV8 is a 22 bp (non-palindromic) target located in the coding sequence of the core protein gene in the Hepatitis B genome. The target sequence corresponds to positions 1908-1929 of the Hepatitis B genome (accession number X70185, FIG. 84).

[0717] The HBV8 sequence is partly a patchwork of the 10TGA_P, 10CAA_P, 5CTT_P and 5_TCT_P targets (FIG. 62) which are cleaved by previously identified meganucleases, obtained as described in International PCT Applications WO 2006/097784 and WO 2006/097853; Arnould et al., J. Mol. Biol., 2006, 355, 443-458; Smith et al., Nucleic Acids Res., 2006. Thus the inventors set out to determine whether HBV8 could be cleaved by combinatorial variants resulting from these previously identified meganucleases.

[0718] The 10TGA_P, 10CAA_P, 5CTT_P and 5_TCT_P target sequences are 24 bp derivatives of C1221, a palindromic sequence cleaved by I-CreI (Arnould et al., precited). However, the structure of I-CreI bound to its DNA target suggests that the two external base pairs of these targets (positions −12 and 12) have no impact on binding and cleavage (Chevalier et al., Nat. Struct. Biol., 2001, 8, 312-316; Chevalier and Stoddard, Nucleic Acids Res., 2001, 29, 3757-3774; Chevalier et al., J. Mol. Biol., 2003, 329, 253-269), and in this study, only positions −11 to 11 were considered. Consequently, the HBV8 series of targets were defined as 22 bp sequences instead of 24 bp. HBV8 differs from C1221 in the 4 bp central region. According to the structure of the I-CreI protein bound to its target, there is no contact between the 4 central base pairs (positions −2 to 2) and the I-CreI protein (Chevalier et al., Nat. Struct. Biol., 2001, 8, 312-316; Chevalier and Stoddard, Nucleic Acids Res., 2001, 29, 3757-3774; Chevalier et al., J. Mol. Biol., 2003, 329, 253-269). Thus, the bases at these positions should not impact the binding efficiency. However, they could affect cleavage, which results from two nicks at the edge of this region. Thus, the ataa sequence in −2 to 2 was first substituted with the gtac sequence from C1221, resulting in target HBV8.2 (FIG. 62). Then, two palindromic targets, HBV8.3 and HBV8.4, were derived from HBV8.2 (FIG. 62). Since HBV8.3 and HBV8.4 are palindromic, they should be cleaved by homodimeric proteins. Thus, proteins able to cleave the HBV8.3 and HBV8.4 sequences as homodimers were first designed (Examples 17, 18 and 19). In order to improve the weak cleavage activity of HBV8.4 variants, a series of variants cleaving HBV8.4 was subjected to random mutagenesis and screened for cleavage activity of the HBV8 target when co-expressed with a protein cleaving HBV8.3 (Example 20). Cleavage activity of the HBV8 target could be observed for these heterodimers. To further improve cleavage activity for the HBV8 target, HBV8.4 variants were optimized by site-directed mutagenesis and used to form novel heterodimers that were screened against the HBV8 target (Example 21). Improved cleavage activity of the HBV8 target could be observed for these heterodimers. Chosen heterodimers were then cloned into mammalian expression vectors and screened against the HBV8 target in CHO cells (Example 22). Strong cleavage activity for the HBV8 target could be observed for these heterodimers in mammalian cells.

### EXAMPLE 17

### Identification of Meganucleases Cleaving HBV83

[0719] This example shows that I-CreI variants can cut the HBV8.3 DNA target sequence derived from the left part of the HBV8.2 target in a palindromic form (FIG. 62). Target sequences described in this example are 22 bp palindromic sequences. Therefore, they will be described only by the first 11 nucleotides, followed by the suffix _P (For example, target HBV8.3 will be noted ttgacccttgt_P).

[0720] HBV8.3 is similar to 10TGA_P at positions ±1, ±2, ±4, ±6, ±8, ±9 and ±10 and to 5CTT_P at positions ±1, ±2, ±3, ±4, ±5, ±6 and ±8. It was hypothesized that positions ±7 and ±11 would have little effect on the binding and cleavage activity. Variants able to cleave the 10TGA_P target were obtained by mutagenesis of I-CreI N75 or D75, at positions 28, 30, 32, 33, 38, 40 and 70, as described previously in Smith et al. Nucleic Acids Res., 2006, 34, e149; International PCT Applications WO 2007/060495 and WO 2007/049156. Variants able to cleave 5CTT_P were obtained by mutagenesis on I-CreI N75 at positions 24, 44, 68, 70, 75 and 77 as described in Arnould et al., J. Mol. Biol., 2006, 355, 443-458; Smith et al. Nucleic Acids Res., 2006, 34, e149; International PCT Applications WO 2006/097784, WO 2006/097853, WO 2007/060495 and WO 2007/049156.

[0721] Both sets of proteins are mutated at position 70. However, the existence of two separable functional subdomains was hypothesized. This implies that this position has little impact on the specificity at bases 10 to 8 of the target. Mutations at positions 24 found in variants cleaving the 5CTT_P target will be lost during the combinatorial process. But it was hypothesized that this will have little impact on the capacity of the combined variants to cleave the HBV8.3 target.

[0722] Therefore, to check whether combined variants could cleave the HBV8.3 target, mutations at positions 44, 68, 70, 75 and 77 from proteins cleaving 5CTT_P were combined with the 28, 30, 32, 33, 38 and 40 mutations from proteins cleaving 10TGA_P.

[0723] A) Material and Methods

[0724] a) Construction of Target Vector

[0725] The target was cloned as follows: an oligonucleotide corresponding to the HBV8.3 target sequence flanked by gateway cloning sequences was ordered from PROLIGO: 5′ tggcatacaagtttattgacccttgtacaagggtcaatcaatcgtctgtca 3′ (SEQ ID NO: 687). Double-stranded target DNA, generated by PCR amplification of the single stranded oligonucleotide, was cloned using the Gateway protocol (INVITROGEN) into the yeast reporter vector (pCLS1055, FIG. 4). Yeast reporter vector was transformed into Saccharomyces cerevisiae strain FYBL2-7B (MAT a, ura3Δ851, trp1Δ63, leu2Δ1, lys2Δ202), resulting in a reporter strain.

[0726] b) Mating of Meganuclease Expressing Clones and Screening in Yeast

[0727] I-CreI variants cleaving 10TGA_P or 5CTT_P were previously identified, as described in Smith et al. Nucleic Acids Res., 2006, 34, e149; International PCT Applications WO 2007/060495 and WO 2007/049156, and Arnould et al., J. Mol. Biol., 2006, 355, 443-458; International PCT Applications WO 2006/097784 and WO 2006/097853, respectively for the 10TGA_P and 5CTT_P targets. In order to generate I-CreI derived coding sequences containing mutations from both series, separate overlapping PCR reactions were carried out that amplify the 5′ end (aa positions 1-43) or the 3′ end (positions 39-167) of the I-CreI coding sequence. For both the 5′ and 3′ end, PCR amplification is carried out using primers (Gal10F 5′-gcaactttagtgctgacacatacagg-3′ (SEQ ID NO: 263) or Gal10R 5′-acaaccttgattggagacttgacc-3′(SEQ ID NO: 264)) specific to the vector (pCLS0542, FIG. 5) and primers (assF 5′-ctannnttgaccttt-3′ (SEQ ID NO: 265) or assR 5′-aaaggtcaannntag-3′(SEQ ID NO: 266)), where mm codes for residue 40, specific to the I-CreI coding sequence for amino acids 39-43. The PCR fragments resulting from the amplification reaction realized with the same primers and with the same coding sequence for residue 40 were pooled. Then, each pool of PCR fragments resulting from the reaction with primers Gal10F and assR or assF and Gal10R was mixed in an equimolar ratio. Finally, approximately 25 ng of each final pool of the two overlapping PCR fragments and 75 ng of vector DNA (pCLS0542, FIG. 5) linearized by digestion with NcoI and EagI were used to transform the yeast Saccharomyces cerevisiae strain FYC2-6A (MATα, trp1Δ63, leu2Δ1, his3Δ200) using a high efficiency LiAc transformation protocol (Gietz and Woods, Methods Enzymol., 2002, 350, 87-96). An intact coding sequence containing both groups of mutations is generated by in vivo homologous recombination in yeast.

[0728] c) Mating of Meganuclease Expressing Clones and Screening in Yeast

[0729] Screening was performed as described previously (Arnould et al., J. Mol. Biol., 2006, 355, 443-458). Mating was performed using a colony gridder (QpixII, GENETIX). Variants were gridded on nylon filters covering YPD plates, using a low gridding density (4-6 spots/cm²). A second gridding process was performed on the same filters to spot a second layer consisting of the reporter-harboring yeast strain for the target of interest. Membranes were placed on solid agar YPD rich medium, and incubated at 30° C. for one night, to allow mating. Next, filters were transferred to synthetic medium, lacking leucine and tryptophan, with galactose (2%) as a carbon source, and incubated for five days at 37° C., to select for diploids carrying the expression and target vectors. After 5 days, filters were placed on solid agarose medium with 0.02% X-Gal in 0.5 M sodium phosphate buffer, pH 7.0, 0.1% SDS, 6% dimethyl formamide (DMF), 7 mM β-mercaptoethanol, 1% agarose, and incubated at 37° C., to monitor β-galactosidase activity. Results were analyzed by scanning and quantification was performed using appropriate software.

[0730] d) Sequencing of Variants

[0731] To recover the variant expression plasmids, yeast DNA was extracted using standard protocols and used to transform E. coli. Sequencing of variant ORFs was then performed on the plasmids by MILLEGEN SA. Alternatively, ORFs were amplified from yeast DNA by PCR (Akada et al., Biotechniques, 2000, 28, 668-670), and sequencing was performed directly on the PCR product by MILLEGEN SA.

[0732] B) Results

[0733] I-CreI combinatorial variants were constructed by associating mutations at positions 44, 68, 70, 75 and 77 from proteins cleaving 5CTT_P with the mutations at 28, 30, 32, 33, 38 and 40 from proteins cleaving 10TGA_P on the I-CreI scaffold, resulting in a library of complexity 1600. Examples of combinatorial variants are displayed in Table LVII. This library was transformed into yeast and 2304 clones (1.4 times the diversity) were screened for cleavage against the HBV8.3 DNA target (ttgacccttgt_P, SEQ ID NO: 687). A total of 160 positive clones were found to cleave HBV8.3. Sequencing and validation by secondary screening of 79 of the best I-CreI variants resulted in the identification of 55 different novel endonucleases. Examples of positives are shown in FIG. 63. The sequence of several of the variants identified display non parental combinations at positions 28, 30, 32, 33, 38, 40 or 44, 68, 70, 75, 77 as well as additional mutations (see examples Table LVIII). Such combinations likely result from PCR artifacts during the combinatorial process. Alternatively, the variants may be I-CreI combined variants resulting from micro-recombination between two original variants during in vivo homologous recombination in yeast.

TABLE LVII
Panel of variants* theoretically present in the combinatorial library

| Amino acids at | | | | | | | | | | |
|---|---|---|---|---|---|---|---|---|---|---|
| Positions 44, 68, 70, | | | | | | | | | | |
| 75 and 77 | | | | | | | | | | |
| (ex: RYSDN stands for | Amino acids at positions 28, 30,32, 33, 38 and 40 | | | | | | | | | |
| R44, Y68, S70, | (ex: KDSRQS stands for K28, D30, S32, R33, Q38 and S40) | | | | | | | | | |
| D75 and N77) | KNRAQS | KNSCSS | KASTQS | KNSVHS | KHSCQS | KNATQS | KNSGTS | KNDCQS | KNSTSS | KNNGQS |
| RYSDN | + | + | + | + | + | + | + | + | + | |
| RYSDQ | | | | | | | | | | |
| RNSNN | | | | | | | | | | |
| RYSNN | | + | | + | + | | | | | |
| RYSYI | | | | | | | | | | |
| RNSDR | | | | | | | | | | |
| RYSNI | | | | | | | | | | |
| RASDR | | | | | | | | | | |
| RTSNN | | | | + | | | | | | |
| RSSNN | | + | | + | | + | | | | |
| RYSHI | | | | | | | | | | |
| RASNN | | | | | | | | | | |
| QNSQR | | | | | | | | | | |
| KASDV | | | | | | | | | | |
| KTSDR | | | | | | | | | | |
| QASNR | | | | | | | | | | |
| KTSDI | | | | | | | | | | |
| RYSYN | | + | | + | + | | | | | + |
| KESDR | | | | | | | | | | |
| KSSDI | | | | | | | | | | |

*Only 200 out of the 1600 combinations are displayed.
+ indicates that a functional combinatorial variant cleaving the HBV8.3 target was found among the identified positives.

TABLE LVIII
I-CreI variants capable of cleaving the HBV8.3
DNA target.

| Amino acids at positions 28, 30, 32, | |
|---|---|
| 33, 38, 40/44, 68, 70, 75 and 77 | |
| of the I-CreI variants | |
| (ex: KNSARS/RYSDN stands for | SEQ |
| R28, N30, S32 ,A33 ,R38, S40/ R44, | ID |
| Y68, S70, D75 and N77) | NO: |
| KNSARS/RYSDN | 690 |
| KNSCRS/RYSDN | 691 |
| KHSCHS/RYSYN | 692 |
| KNSATS/RAYSN | 693 |
| KNRAQS/RTSNN + 158E | 694 |
| KNSCSS/RYSNN + 162F | 695 |

### EXAMPLE 18

### Identification of Meganucleases Cleaving HBV8.4

[0734] This example shows that I-CreI variants can cleave the HBV8.4 DNA target sequence derived from the right part of the HBV8.2 target in a palindromic form (FIG. 62). All target sequences described in this example are 22 by palindromic sequences. Therefore, they will be described only by the first 11 nucleotides, followed by the suffix _P (for example, HBV8.4 will be called ccaaattctgt_P).

[0735] HBV8.4 is similar to 5TCT_P at positions ±1, ±2, ±3, ±4, ±5, ±7, ±8, ±9 and ±11 and to 10CAA_P at positions ±1, ±2, ±7, ±8, ±9, ±10 and ±11. It was hypothesized that position ±6 would have little effect on the binding and cleavage activity. Variants able to cleave 5TCT_P were obtained by mutagenesis of I-CreI N75 at positions 24, 44, 68, 70, 75 and 77, as described previously (Arnould et al., J. Mol. Biol., 2006, 355, 443-458; Smith et al. Nucleic Acids Res., 2006, 34, e149; International PCT Applications WO 2006/097784, WO 2006/097853, WO 2007/060495 and WO 2007/049156). Variants able to cleave the 10CAA_P target were obtained by mutagenesis of I-CreI N75 or D75, at positions 28, 30, 32, 33, 38 and 40, as described previously in Smith et al. Nucleic Acids Res., 2006, 34, e149; International PCT Applications WO 2007/060495 and WO 2007/049156.

[0736] Mutations at position 24 found in variants cleaving the 5TCT_P target will be lost during the combinatorial process. But it was hypothesized that this will have little impact on the capacity of the combined variants to cleave the HBV8.4 target.

[0737] Therefore, to check whether combined variants could cleave the HBV8.4 target, mutations at positions 44, 68, 70, 75 and 77 from proteins cleaving 5TCT_P were combined with the 28, 30, 32, 33, 38 and 40 mutations from proteins cleaving 10CAA_P.

[0738] A) Material and Methods

[0739] a) Construction of Target Vector

[0740] The experimental procedure is as described in Example 17, with the exception that an oligonucleotide corresponding to the HBV8.4 target sequence was used: 5′ tggcatacaagttttccaaattctgtacagaatttggacaatcgtctgtca 3′ (SEQ ID NO: 696).

[0741] b) Construction of Combinatorial Variants

[0742] I-CreI variants cleaving 10CAA_P or 5TCT_P were previously identified, as described in Smith et al. Nucleic Acids Res., 2006, 34, e149; International PCT Applications WO 2007/060495 and WO 2007/049156, and Arnould et al., J. Mol. Biol., 2006, 355, 443-458; International PCT Applications WO 2006/097784 and WO 2006/097853, respectively for the 10CAA_P and 5TCT_P targets. In order to generate I-CreI derived coding sequences containing mutations from both series, separate overlapping PCR reactions were carried out that amplify the 5′ end (aa positions 1-43) or the 3′ end (positions 39-167) of the I-CreI coding sequence. For both the 5′ and 3′ end, PCR amplification is carried out using primers (Gal10F 5′-gcaactttagtgctgacacatacagg-3′ (SEQ ID NO: 263) or Gal10R 5′-acaaccttgattggagacttgacc-3′ (SEQ ID NO: 264) specific to the vector (pCLS1107, FIG. 6) and primers (assF 5′-ctannnttgaccttt-3′ (SEQ ID NO: 265) or assR 5′-aaaggtcaannntag-3′(SEQ ID NO: 266), where nnn codes for residue 40, specific to the I-CreI coding sequence for amino acids 39-43. The PCR fragments resulting from the amplification reaction realized with the same primers and with the same coding sequence for residue 40 were pooled. Then, each pool of PCR fragments resulting from the reaction with primers Gal10F and assR or assF and Gal 10R was mixed in an equimolar ratio. Finally, approximately 25 ng of each final pool of the two overlapping PCR fragments and 75 ng of vector DNA (pCLS1107, FIG. 6) linearized by digestion with DraIII and NgoMIV were used to transform the yeast Saccharomyces cerevisiae strain FYC2-6A (MATα, trp1Δ63, leu2Δ1, his3Δ200) using a high efficiency LiAc transformation protocol (Gietz and Woods, Methods Enzymol., 2002, 350, 87-96). An intact coding sequence containing both groups of mutations is generated by in vivo homologous recombination in yeast.

[0743] c) Mating of Meganuclease Expressing Clones and Screening in Yeast

[0744] Screening was performed as described previously (Arnould et al., J. Mol. Biol., 2006, 355, 443-458). Mating was performed using a colony gridder (QpixII, GENETIX). Variants were gridded on nylon filters covering YPD plates, using a low gridding density (4-6 spots/cm²). A second gridding process was performed on the same filters to spot a second layer consisting of the reporter-harboring yeast strain. Membranes were placed on solid agar YPD rich medium, and incubated at 30° C. for one night, to allow mating. Next, filters were transferred to synthetic medium, lacking tryptophan, including G418, with galactose (2%) as a carbon source, and incubated for five days at 37° C., to select for diploids carrying the expression and target vectors. After 5 days, filters were placed on solid agarose medium with 0.02% X-Gal in 0.5 M sodium phosphate buffer, pH 7.0, 0.1% SDS, 6% dimethyl formamide (DMF), 7 mM β-mercaptoethanol, 1% agarose, and incubated at 37° C., to monitor β-galactosidase activity. Results were analyzed by scanning and quantification was performed using appropriate software.

[0745] d) Sequencing of Variants

[0746] The experimental procedure is as described in Example 17.

[0747] B) Results

[0748] I-CreI combinatorial variants were constructed by associating mutations at positions 44, 68, 70, 75 and 77 from proteins cleaving 5TCT_P with the mutations 28, 30, 32, 33, 38 and 40 from proteins cleaving 10CAA_P on the I-CreI scaffold, resulting in a library of complexity 1600. Examples of combinatorial variants are displayed in Table LIX. This library was transformed into yeast and 2304 clones (1.4 times the diversity) were screened for cleavage against the HBV8.4 DNA target (ccaaattctgt_P SEQ ID NO: 688). Two positive clones were found, which after sequencing turned out to correspond to two different novel endonuclease variants (Table LIX and Table LX). Examples of positives are shown in FIG. 64. One of these two variants display non parental combinations at positions 28, 30, 32, 33, 38, 40 or 44, 68, 70, 75, 77. Such combinations likely result from PCR artifacts during the combinatorial process. Alternatively, the variants may be I-CreI combined variants resulting from micro-recombination between two original variants during in vivo homologous recombination in yeast.

TABLE LIX
Panel of variants* theoretically present in the combinatorial library

| Amino acids at | | | | | | | | | | |
|---|---|---|---|---|---|---|---|---|---|---|
| positions 44, 68, 70, | | | | | | | | | | |
| 75 and 77 | | | | | | | | | | |
| (ex: KGGNI stands | Amino acids at positions 28, 30,32, 33, 38 and 40 | | | | | | | | | |
| for K44, G68, G70, | (ex: KNSGQS stands for K28, N30, S32, G33, Q38 and S40) | | | | | | | | | |
| N75 and I77) | KNSGQS | KRDYQQ | KNKTQS | KNGHQS | KNAHQS | KNEYQS | KNTQQS | KNRDQS | KNSCQQ | KNSHQQ |
| KGGNI | | | | | | | | | | |
| KNANI | | | | | | | | | | |
| KADNI | | | | | | | | | | |
| KNENI | | | | | | | | | | |
| KGSNI | | | | | | | | | | |
| QRSNK | | | | | | | | | | + |
| KYSNI | | | | | | | | | | |
| PCSYT | | | | | | | | | | |
| KESNR | | | | | | | | | | |
| QASNR | | | | | | | | | | |
| KASNI | | | | | | | | | | |
| QQSNR | | | | | | | | | | |
| QNSNR | | | | | | | | | | |
| QDSRR | | | | | | | | | | |
| HYSNH | | | | | | | | | | |

*Only 150 out of the 1600 combinations are displayed.
+ indicates that a functional combinatorial variant cleaving the HBV8.4 target was found among the identified positives.

TABLE LX
I-CreI variants with additional mutations capable
of cleaving the HBV8.4 DNA target.

| Amino acids at positions 28, 30, 32, | |
|---|---|
| 33, 38, 40/44, 68, 70, 75 and 77 | |
| of the I-CreI variants | |
| (ex: KNSHQQ/QRSNK + 163Q | |
| stands for K28, N30, S32, H33, | SEQ |
| Q38, Q40/Q44, R68, S70, N75 and | ID |
| K77, 163Q) | NO: |
| KNSHQQ/QRSNK + 163Q | 697 |

### EXAMPLE 19

### Identification of Meganucleases Cleaving HBV8.4 Through the Generation of Combinatorial Variants Containing 105A and 132V Substitutions

[0749] A combinatorial library containing selected amino-acid substitutions was produced as an alternative approach to generating I-CreI variants that cleave the HBV8.4 DNA target.

[0750] Two amino-acid substitutions have been found in previous studies to enhance the activity of I-CreI derivatives and could easily be incorporated into a combinatorial library: these mutations correspond to the replacement of Valine 105 with Alanine (V105A) and Isoleucine 132 with Valine (I132V). Both of these substitutions were introduced into all variants of a combinatorial library containing mutations at positions 44, 68, 70, 75 and 77 from proteins cleaving 5TCT_P combined with the 28, 30, 32, 33, 38 and 40 mutations from proteins cleaving 10CAA_P.

[0751] A) Material and Methods

[0752] a) Construction of Combinatorial Variants

[0753] I-CreI variants cleaving 10CAA_P or 5TCT_P were previously identified, as described in Smith et al. Nucleic Acids Res., 2006, 34, e149; International PCT Applications WO 2007/060495 and WO 2007/049156, and Arnould et al., J. Mol. Biol., 2006, 355, 443-458; International PCT Applications WO 2006/097784 and WO 2006/097853, respectively for the 10CAA_P and 5TCT_P targets. In order to generate I-CreI derived coding sequences containing mutations from both series, separate overlapping PCR reactions were carried out that amplify the 5′ end (aa positions 1-43) or the 3′ end (positions 39-104) of the I-CreI coding sequence. The remaining 3′ sequences of I-CreI containing the 105A and 132V substitutions are present in the vector pCLS1884. For both the 5′ and 3′ end amplifications, PCR is carried out using primers (Gal10F 5′-gcaactttagtgctgacacatacagg-3′ (SEQ ID NO: 263) or CreRevBsgI 5′-caggtttgcctgtttctgtttcagtttcagaaacggctg-3′ (SEQ ID NO: 698)) containing homology to the vector (pCLS1884, FIG. 65) and primers (assF 5′-ctannnttgaccttt-3′ (SEQ ID NO: 265) or assR 5′-aaaggtcaannntag-3′(SEQ ID NO: 266)), where nnn codes for residue 40, specific to the I-CreI coding sequence for amino acids 39-43. The PCR fragments resulting from the amplification reaction realized with the same primers and with the same coding sequence for residue 40 were pooled. Then, each pool of PCR fragments resulting from the reaction with primers Gal10F and assR or assF and CreRevBsgI was mixed in an equimolar ratio. Finally, approximately 25 ng of each final pool of the two overlapping PCR fragments and 75 ng of vector DNA (pCLS1884, FIG. 65) linearized by digestion with NcoI and BsgI were used to transform the yeast Saccharomyces cerevisiae strain FYC2-6A (MATα, trp1Δ63, leu2Δ1, his3Δ200) using a high efficiency LiAc transformation protocol (Gietz and Woods, Methods Enzymol., 2002, 350, 87-96). An intact coding sequence containing both groups of mutations as well as the 105A and 132V substitutions is generated by in vivo homologous recombination in yeast.

[0754] b) Mating of Meganuclease Expressing Clones and Screening in Yeast

[0755] The experimental procedure is as described in Example 18.

[0756] c) Sequencing of Variants

[0757] The experimental procedure is as described in Example 17.

[0758] B) Results

[0759] I-CreI combinatorial variants were constructed by associating mutations at positions 44, 68, 70, 75 and 77 from proteins cleaving 5TCT_P with the mutations 28, 30, 32, 33, 38 and 40 from proteins cleaving 10CAA_P on an I-CreI scaffold containing the amino acid substitutions 105A and 132V, resulting in a library of complexity 1600. This library was transformed into yeast and 2304 clones (1.4 times the diversity) were screened for cleavage against the HBV8.4 DNA target (ccaaattctgt_P). Four positive clones were found, which after sequencing turned out to correspond to four different novel endonuclease variants (Table LXI). Examples of positives are shown in FIG. 66. All four variants contain the 105A and 132V substitutions as well as display non parental combinations at positions 28, 30, 32, 33, 38, 40 or 44, 68, 70, 75, 77. Such combinations likely result from PCR artifacts during the combinatorial process. Alternatively, the variants may be I-CreI combined variants resulting from micro-recombination between two original variants during in vivo homologous recombination in yeast.

TABLE LXI
I-CreI variants with additional mutations capable
of cleaving the HBV8.4 DNA target

| Amino acids at positions 28, 30, 32, | |
|---|---|
| 33, 38, 40/44, 68, 70, 75 and 77 | |
| of the I-CreI variants | |
| (ex: KNSHQQ/KASNI | |
| + 105A + 132V stands for K28, N30, | SEQ |
| S32, H33, Q38, Q40/K44, A68, | ID |
| S70, N75 and I77, 105A, 132V) | NO: |
| KNSHQQ/KASNI + 105A + 132V | 699 |
| KNSHQQ/KNANI + 105A + 132V | 700 |
| KNEYQS/QASNR + 105A + 132V | 701 |
| KNEYQS/QSSNR + 105A + 132V | 702 |

### EXAMPLE 20

### Improvement of Meganucleases Cleaving HBV8.4 by Random Mutagenesis

[0760] I-CreI variants able to cleave the palindromic HBV8.4 target have been previously identified in Examples 18 and 19. However, the HBV8.4 variants display very weak activity with the HBV8.4 target. In this example, it was determined if the activity of the HBV8.4 meganucleases could be increased and at the same time it was tested whether they could cleave HBV8 efficiently when co-expressed with a protein cleaving HBV8.3. The six combinatorial variants cleaving HBV8.4 were mutagenized by random mutagenesis, and in a second step, it was assessed whether they could cleave HBV8 when co-expressed with a protein cleaving HBV8.3.

[0761] A) Material and Methods

[0762] a) Construction of Target Vector

[0763] The experimental procedure is as described in Example 17, with the exception that an oligonucleotide corresponding to the HBV8 target sequence: 5′ tggcatacaagtttattgacccttataaagaatttggacaatcgtctgtca 3′ (SEQ ID NO: 685) was used.

[0764] b) Construction of Libraries by Random Mutagenesis

[0765] Random mutagenesis was performed on a pool of chosen variants, by PCR using Mn²⁺. PCR reactions were carried out that amplify the I-CreI coding sequence using the primers preATGCreFor (5′-gcataaattactatacttctatagacacgcaaacacaaatacacagcggccttgccacc-3′; SEQ ID NO: 169) and ICreIpostRev (5′-ggctcgaggagctcgtctagaggatcgctcgagttatcagtcggccgc-3′; SEQ ID NO: 170). Approximately 25 ng of the PCR product and 75 ng of vector DNA (pCLS1107, FIG. 6) linearized by digestion with DraIII and NgoMIV were used to transform the yeast Saccharomyces cerevisiae strain FYC2-6A (MATα, trp1Δ63, leu2Δ1, his3Δ200) using a high efficiency LiAc transformation protocol (Gietz and Woods, Methods Enzymol., 2002, 350, 87-96). Expression plasmids containing an intact coding sequence for the I-CreI variant were generated by in vivo homologous recombination in yeast.

[0766] c) Variant-Target Yeast Strains

[0767] The yeast strain FYBL2-7B (MAT a, ura3Δ851, trp1Δ63, leu2Δ1, lys2Δ202) containing the HBV8 target in the yeast reporter vector (pCLS1055, FIG. 4) was transformed with variants, in the leucine vector (pCLS0542), cutting the HBV8.3 target, using a high efficiency LiAc transformation protocol.

[0768] d) Mating of Meganuclease Expressing Clones and Screening in Yeast

[0769] Mating was performed using a colony gridder (QpixII, Genetix). Variants were gridded on nylon filters covering YPD plates, using a low gridding density (about 4 spots/cm²). A second gridding process was performed on the same filters to spot a second layer consisting of a variant-target yeast strain for the target of interest. Membranes were placed on solid agar YPD rich medium, and incubated at 30° C. for one night, to allow mating. Next, filters were transferred to synthetic medium, lacking leucine and tryptophan, including G418, with galactose (2%) as a carbon source, and incubated for five days at 37° C., to select for diploids carrying the expression and target vectors. After 5 days, filters were placed on solid agarose medium with 0.02% X-Gal in 0.5 M sodium phosphate buffer, pH 7.0, 0.1% SDS, 6% dimethyl formamide (DMF), 7 mM β-mercaptoethanol, 1% agarose, and incubated at 37° C., to monitor 3-galactosidase activity. Results were analyzed by scanning and quantification was performed using appropriate software.

[0770] e) Sequencing of Variants

[0771] The experimental procedure is as described in Example 17.

[0772] B) Results

[0773] Six variants cleaving HBV8.4 (I-CreI 33H,40Q,70S,75N,77K, I-CreI 33H,40Q,70S,75N,77K,163Q, I-CreI 33H,40Q,44K,68A,70S,75N,105A,132V, I-CreI 33H,40Q,44K,68N,70A,75N,105A,132V, I-CreI 32E,68A,70S,75N,77R,105A,132V and I-CreI 32E,68S,70S,75N,77R,105A,132V also called KNSHQQ/QRSNK (SEQ ID NO: 704), KNSHQQ/QRSNK+163Q (SEQ ID NO: 697), KNSHQQ/KASNI+105A+132V (SEQ ID NO: 699), KNSHQQ/KNANI+105A132V (SEQ ID NO: 700), KNEYQS/QASNR+105A+132V (SEQ ID NO: 701), and KNEYQS/QSSNR+105A+132V (SEQ ID NO: 702), respectively, according to the nomenclature of Table LXIX, LXX and LXXI) were pooled, randomly mutagenized and transformed into yeast. 2304 transformed clones were then mated with a yeast strain that contains (i) the HBV8 target in a reporter plasmid (ii) an expression plasmid containing a variant that cleaves the HBV8.3 target (I-CreI 33C,38R,44R,68Y,70S,75D,77N or KNSCRS/RYSDN (SEQ ID NO: 691) according to the nomenclature of Table LVIII). After mating with this yeast strain, 379 clones were found to cleave the HBV8 target. Thus, 379 positives contained proteins able to form heterodimers with KNSCRS/RYSDN with cleavage activity for the HBV8 target. An example of positives is shown in FIG. 17. Sequencing of the strongest 186 positive clones indicates that 32 distinct variants were identified (Examples listed in Table LXII).

TABLE LXII
Functional variant combinations displaying
cleavage activity for HBV8.

| | | Optimized Variants HBV8.4 |
|---|---|---|
| | | (SEQ ID NO: 705 to 711) |
| VARIANT | I-CreI 33C | 33H 40Q 70S 75N 77K |
| HBV8.3 | 38R 44R 68Y | 105A 132V |
| | 70S 75D 77N | 33H 40Q 68A 70S 75N 77R |
| | (KNSCRS/RYSDN) | 105A 132V |
| | (SEQ ID | 33H 40Q 68A 70S 75N 77R |
| | NO: 691 | 132V |
| | | 33H 40Q 70S 75N 77K 132V |
| | | 33H 40Q 68S 70S 75N 77R |
| | | 105A 132V |
| | | 33H 40Q 70S 75N 77K 105A |
| | | 33H 40Q 68A 70S 75N 77R |
| | | 105A |

* Mutations resulting from mutagenesis are in bold.

### EXAMPLE 21

### Improvement of Meganucleases Cleaving HBV8 by Site-Directed Mutagenesis of Proteins Cleaving HBV8.4 and Assembly with Proteins Cleaving

[0774] HBV8.3

[0775] The I-CreI optimized variants cleaving HBV8.4 described in Example 20 were further mutagenized by introducing selected amino-acid substitutions in the proteins and screening for more efficient variants cleaving HBV8 in combination with a variant cleaving HBV8.3.

[0776] Two amino-acid substitutions found in previous studies to enhance the activity of I-CreI derivatives were introduced into HBV8.4 variants: these mutations correspond to the replacement of Glycine 19 with Serine (G19S) and Phenylalanine 54 with Leucine (F54L). These mutations were individually introduced into the coding sequence of proteins cleaving HBV8.4, and the resulting proteins were tested for their ability to induce cleavage of the HBV8 target, upon co-expression with a variant cleaving HBV8.3.

[0777] A) Material and Methods

[0778] a) Site-Directed Mutagenesis

[0779] Site-directed mutagenesis libraries were created by PCR on a pool of chosen variants. For example, to introduce the G19S substitution into the coding sequence of the variants, two separate overlapping PCR reactions were carried out that amplify the 5′ end (residues 1-24) or the 3′ end (residues 14-167) of the I-CreI coding sequence. For both the 5′ and 3′ end, PCR amplification is carried out using a primer with homology to the vector (Gal10F 5′-gcaactttagtgctgacacatacagg-3′ (SEQ ID NO: 263) or Gal10R 5′-acaaccttgattggagacttgacc-3′(SEQ ID NO: 264)) and a primer specific to the I-CreI coding sequence for amino acids 14-24 that contains the substitution mutation G19S (G19SF 5′-gccggattgtggactctgacggtagcatcatc-3′ (SEQ ID NO: 653) or G19SR 5′-gatgatgctaccgtcagagtccacaaagccggc-3′(SEQ ID NO: 654). The resulting PCR products contain 33 bp of homology with each other. The PCR fragments were purified. Approximately 25 ng of each of the two overlapping PCR fragments and 75 ng of vector DNA (pCLS1107, FIG. 6) linearized by digestion with DraIII and NgoMIV were used to transform the yeast Saccharomyces cerevisiae strain FYC2-6A (MATα, trp1Δ63, leu2Δ1, his3Δ200) using a high efficiency LiAc transformation protocol (Gietz and Woods, Methods Enzymol., 2002, 350, 87-96). Intact coding sequences containing the G19S substitution are generated in vivo homologous recombination in yeast.

[0780] The same strategy is used with the following pair of oligonucleotides to create the library containing the F54L substitution:
[0781] F54LF: 5′-acccagcgccgttggctgctggacaaactagtg-3′ and F54LR: 5′-cactagtttgtccagcagccaacggcgctgggt-3′ (SEQ ID NO: 655 and 656);

[0782] b) Mating of Meganuclease Expressing Clones and Screening in Yeast

[0783] The experimental procedure is as described in Example 20.

[0784] c) Sequencing of Variants

[0785] The experimental procedure is as described in Example 17.

[0786] B) Results

[0787] Libraries containing one of two amino-acid substitutions (G19S or F54L) were constructed on a pool of five variants cleaving HBV8.4 (33H,40Q,70S,75N,77K,105A,132V (SEQ ID NO: 705); 33H,40Q,68A,70S,75N,77R,105A,132V (SEQ ID NO: 706); 33H,40Q,68A,70S,75N,77R,132V (SEQ ID NO: 707); 33H,40Q,70S,75N,77K,132V (SEQ ID NO: 708) and 33H,40Q,68S,70S,75N77R,105A,132V (SEQ ID NO: 709), according to the nomenclature of Table LXII). 576 transformed clones for each library were then mated with a yeast strain that contains (i) the HBV8 target in a reporter plasmid (ii) an expression plasmid containing a variant that cleaves the HBV8.3 target (I-CreI 33C,38R,44R,68Y,70S,75D,77N or KNSCRS/RYSDN (SEQ ID NO: 691) according to the nomenclature of Table LVIII).

[0788] After mating with this yeast strain, a large number of clones (>100) in the library containing amino-acid substitution Glycine 19 with Serine (G19S), were found to cleave the HBV8 target more efficiently than the original variants. An Example of positives is shown in FIG. 68. The sequence of the four best I-CreI variants cleaving the HBV8 target when forming a heterodimer with the KNSCRS/RYSDN variant are listed in Table LXIII.

TABLE LXIII
Functional variant combinations displaying strong
cleavage activity for HBV8.

| | | Optimized* Variants HBV8.4 |
|---|---|---|
| | | (SEQ ID NO: 712 to 715) |
| VARIANT | -CreI 33C 38R | 19S 33H 40Q 43I 70S 75N 77K |
| HBV8.3 | 44R 68Y 70S | 105A 132V |
| | 75D 77N | 19S 33H 40Q 70S 75N 77K 105A |
| | (KNSCRS/ | 132V |
| | RYSDN) | 19S 33H 40Q 70S 75N 77K 105A |
| | (SEQ ID | 19S 33H 40Q 70S 75N 77K 132V |
| | NO: 691) | |

* Mutations resulting from mutagenesis are in bold.

### EXAMPLE 22

### Validation of HBV8 Target Cleavage in an Extrachromosomal Model in CHO Cells

[0789] I-CreI variants able to efficiently cleave the HBV8 target in yeast when forming heterodimers were described in Examples 20 and 21. In order to further validate heterodimers displaying strong cleavage activity for the HBV8 target in yeast cells, the efficiency of chosen combinations of variants to cut the HBV8 target was analyzed, using an extrachromosomal assay in CHO cells. The screen in CHO cells is a single-strand annealing (SSA) based assay where cleavage of the target by the meganucleases induces homologous recombination and expression of a LagoZ reporter gene (a derivative of the bacterial lacZ gene).

[0790] 1) Materials and Methods

[0791] a) Cloning of HBV8 Target in a Vector for CHO Screen

[0792] The target was cloned as follows: oligonucleotide corresponding to the HBV8 target sequence flanked by gateway cloning sequence was ordered from PROLIGO: 5′ tggcatacaagtttattgacccttataaagaatttggacaatcgtctgtca 3′ (SEQ ID NO: 685). Double-stranded target DNA, generated by PCR amplification of the single stranded oligonucleotide, was cloned using the Gateway protocol (INVITROGEN) into CHO reporter vector (pCLS1058, FIG. 11). Cloned target was verified by sequencing (MILLEGEN).

[0793] b) Re-Cloning of Meganucleases

[0794] The ORF of I-CreI variants cleaving the HBV8.3 and HBV8.4 targets identified in Examples 17 and 21 were re-cloned in pCLS1768 (FIG. 29). ORFs were amplified by PCR on yeast DNA using the attB1-ICreIFor (5′-ggggacaagtttgtacaaaaaagcaggcttcgaaggagatagaaccatggecaataccaaatataacaaagagttcc-3′; SEQ ID NO: 716) and attB2-ICreIRev (5′-ggggaccactttgtacaagaaagctgggtttagtcggccgccggggaggatttcttctctcgc-3′; SEQ ID NO: 717) primers. PCR products were cloned in the CHO expression vector pCLS1768 (FIG. 29) using the Gateway protocol (INVITROGEN). Resulting clones were verified by sequencing (MILLEGEN).

[0795] c) Extrachromosomal Assay in Mammalian Cells

[0796] CHO cells were transfected with Polyfect® transfection reagent according to the supplier's protocol (QIAGEN). 72 hours after transfection, culture medium was removed and 150 μl of lysis/revelation buffer for β-galactosidase liquid assay was added (typically 1 liter of buffer contained: 100 ml of lysis buffer (Tris-HCl 10 mM pH7.5, NaCl 150 mM, Triton X100 0.1%, BSA 0.1 mg/ml, protease inhibitors), 10 ml of Mg 100× buffer (MgCl₂ 100 mM, β-mercaptoethanol 35%), 110 ml ONPG 8 mg/ml and 780 ml of sodium phosphate 0.1M pH7.5). After incubation at 37° C., OD was measured at 420 nm. The entire process is performed on an automated Velocity11 BioCel platform.

[0797] Per assay, 150 ng of target vector was co-transfected with 12.5 ng of each one of both variants (12.5 ng of variant cleaving palindromic HBV8.3 target and 12.5 ng of variant cleaving palindromic HBV8.4 target).

[0798] 2) Results

[0799] One HBV8.3 variant (I-CreI 33C,38R,44R,68Y,70S,75D, 77N, SEQ ID NO: 691) and two HBV8.4 variants (I-CreI 19S 331440Q 43170S 75N 77K 105A 132V, SEQ ID NO: 712 and I-CreI 19S 33H 40Q 70S 75N 77K 105A 132V, SEQ ID NO:713) described in Examples 17 and 21 were first re-cloned in pCLS1768 (FIG. 29). Then, in order to validate the cleavage activity of the heterodimers with the HBV8 target, the I-CreI variants cleaving the HBV8.3 or HBV8.4 targets were tested together as heterodimers against the HBV8 target in the CHO extrachromosomal assay.

[0800] FIG. 69 shows the results obtained for the two heterodimers against the HBV8 target in CHO cells assay, compared to the activity of I-SceI against its target (tagggataacagggtaat, SEQ ID NO: 718). Analysis of the efficiencies of cleavage of the HBV8 sequence demonstrates that both combinations of I-CreI variants are able to cut the HBV8 target in CHO cells with an activity similar to that of I-SceI against the I-SceI target.

### EXAMPLE 23

### Strategy for Engineering Novel Meganucleases Cleaving the HBV3 Target from the HBV Genome

[0801] HBV3 is a 22 bp (non-palindromic) target located in the coding sequence of the core protein gene in the Hepatitis B genome. The target sequence corresponds to positions 2216-2237 of the Hepatitis B genome (accession number M38636, FIG. 84).

[0802] The HBV3 sequence is partly a patchwork of the 10TGC_P, 10TCT_P, 5TAC_P and 5TCC_P targets (FIG. 70) which are cleaved by previously identified meganucleases, obtained as described in International PCT Applications WO 2006/097784 and WO 2006/097853; Arnould et al., J. Mol. Biol., 2006, 355, 443-458; Smith et al., Nucleic Acids Res., 2006. Thus the inventors set out to determine whether HBV3 could be cleaved by combinatorial variants resulting from these previously identified meganucleases.

[0803] The 10TGC_P, 10TCT_P, 5TAC_P and 5TCC_P target sequences are 24 bp derivatives of C1221, a palindromic sequence cleaved by I-CreI (Arnould et al., precited). However, the structure of I-CreI bound to its DNA target suggests that the two external base pairs of these targets (positions −12 and 12) have no impact on binding and cleavage (Chevalier et al., Nat. Struct. Biol., 2001, 8, 312-316; Chevalier and Stoddard, Nucleic Acids Res., 2001, 29, 3757-3774; Chevalier et al., J. Mol. Biol., 2003, 329, 253-269), and in this study, only positions −11 to 11 were considered. Consequently, the HBV3 series of targets were defined as 22 bp sequences instead of 24 bp. HBV3 differs from C1221 in the 4 bp central region. According to the structure of the I-CreI protein bound to its target, there is no contact between the 4 central base pairs (positions −2 to 2) and the I-CreI protein (Chevalier et al., Nat. Struct. Biol., 2001, 8, 312-316; Chevalier and Stoddard, Nucleic Acids Res., 2001, 29, 3757-3774; Chevalier et al., J. Mol. Biol., 2003, 329, 253-269). Thus, the bases at these positions should not impact the binding efficiency. However, they could affect cleavage, which results from two nicks at the edge of this region. Thus, the tttt sequence in −2 to 2 was first substituted with the gtac sequence from C1221, resulting in target HBV3.2 (FIG. 70). Then, two palindromic targets, HBV3.3 and HBV3.4, were derived from HBV3.2 (FIG. 71). Since HBV3.3 and HBV3.4 are palindromic, they should be cleaved by homodimeric proteins. In addition, to test the influence of the tttt sequence on the activity of homodimeric proteins two pseudo-palindromic targets were created, containing the tttt sequence at positions −2 to 2 (targets HBV3.5 and HBV3.6, FIG. 70). Thus, proteins able to cleave the HBV3.3 and HBV3.4 sequences as homodimers were first designed (Examples 24 and 25) and then co-expressed to obtain heterodimers cleaving HBV3.2 (Example 26). In order to obtain cleavage activity for the HBV3 target, a series of variants cleaving HBV3.3 and HBV3.4 was chosen and refined. The chosen variants were subjected to random mutagenesis, screened for activity with the HBV3.5 and HBV3.6 targets (Examples 27 and 28) and were subsequently used to form novel heterodimers that were screened against the HBV3 target (Example 29). Heterodimers could be identified with cleavage activity for the HBV3 target. To further improve the cleavage activity for the HBV3 target, a series of variants cleaving HBV3.3 and HBV3.4 was chosen, refined, cloned into mammalian expression vectors and screened against the HBV3 target in CHO cells (Examples 30, 31 and 32). Heterodimers could be identified with strong cleavage activity for the HBV3 target in mammalian cells. Finally, a single-chain construct was assembled and screened against the HBV3 target in CHO cells (Example 33). The single-chain construct displayed cleavage activity for the HBV3 target in mammalian cells that was comparable to the HBV3.3/HBV3.4 heterodimer.

### EXAMPLE 24

### Identification of Meganucleases Cleaving HBV3.3

[0804] This example shows that I-CreI variants can cut the HBV3.3 DNA target sequence derived from the left part of the HBV3.2 target in a palindromic form (FIG. 70). Target sequences described in this example are 22 bp palindromic sequences. Therefore, they will be described only by the first 11 nucleotides, followed by the suffix _P (For example, target HBV3.3 will be noted ctgccttacgt_P).

[0805] HBV3.3 is similar to 10TGC_P at positions ±1, ±2, ±3, ±9, ±10 and ±11 and to 5TAC_P at positions ±1, ±2, ±3, ±4, ±5 and ±11. It was hypothesized that positions ±6 and ±7 would have little effect on the binding and cleavage activity. Variants able to cleave the 10 TGC_P target were obtained by mutagenesis of I-CreI N75 or D75, at positions 28, 30, 32, 33, 38 and 40, as described previously in Smith et al. Nucleic Acids Res., 2006, 34, e149; International PCT Applications WO 2007/060495 and WO 2007/049156. Variants able to cleave 5TAC_P were obtained by mutagenesis on I-CreI N75 at positions 24, 44, 68, 70, 75 and 77 as described in Arnould et al., J. Mol. Biol., 2006, 355, 443-458; Smith et al. Nucleic Acids Res., 2006, 34, e149; International PCT Applications WO 2006/097784, WO 2006/097853, WO 2007/060495 and WO 2007/049156.

[0806] Mutations at positions 24 found in variants cleaving the 5TAC_P target will be lost during the combinatorial process. But it was hypothesized that this will have little impact on the capacity of the combined variants to cleave the HBV3.3 target.

[0807] Therefore, to check whether combined variants could cleave the HBV3.3 target, mutations at positions 44, 68, 70, 75 and 77 from proteins cleaving 5TAC_P were combined with the 28, 30, 32, 33, 38 and 40 mutations from proteins cleaving 10TGC_P.

[0808] A) Material and Methods

[0809] a) Construction of Target Vector

[0810] The target was cloned as follows: an oligonucleotide corresponding to the HBV3.3 target sequence flanked by gateway cloning sequences was ordered from PROLIGO: 5′ tggcatacaagtttcctgccttacgtacgtaaggcaggcaatcgtctgtca 3′ (SEQ ID NO: 729). Double-stranded target DNA, generated by PCR amplification of the single stranded oligonucleotide, was cloned using the Gateway protocol (INVITROGEN) into the yeast reporter vector (pCLS1055, FIG. 4). Yeast reporter vector was transformed into Saccharomyces cerevisiae strain FYBL2-7B (MAT a, ura3Δ851, trp1Δ63, leu2Δ1, lys2Δ202), resulting in a reporter strain.

[0811] b) Construction of Combinatorial Variants

[0812] I-CreI variants cleaving 10TGC_P or 5TAC_P were previously identified, as described in Smith et al. Nucleic Acids Res., 2006, 34, e149; International PCT Applications WO 2007/060495 and WO 2007/049156, and Arnould et al., J. Mol. Biol., 2006, 355, 443-458; International PCT Applications WO 2006/097784 and WO 2006/097853, respectively for the 10TGC_P and 5TAC_P targets. In order to generate I-CreI derived coding sequences containing mutations from both series, separate overlapping PCR reactions were carried out that amplify the 5′ end (aa positions 1-43) or the 3′ end (positions 39-167) of the I-CreI coding sequence. For both the 5′ and 3′ end, PCR amplification is carried out using primers (Gal10F 5′-gcaactttagtgctgacacatacagg-3′ (SEQ ID NO: 263) or Gal10R 5′-acaaccttgattggagacttgacc-3′(SEQ ID NO: 264)) specific to the vector (pCLS0542, FIG. 5) and primers (assF 5′-ctannnttgaccttt-3′ (SEQ ID NO: 265) or assR 5′-aaaggtcaannntag-3′(SEQ ID NO: 266)), where nnn codes for residue 40, specific to the I-CreI coding sequence for amino acids 39-43. The PCR fragments resulting from the amplification reaction realized with the same primers and with the same coding sequence for residue 40 were pooled. Then, each pool of PCR fragments resulting from the reaction with primers Gal10F and assR or assF and Gal10R was mixed in an equimolar ratio. Finally, approximately 25 ng of each final pool of the two overlapping PCR fragments and 75 ng of vector DNA (pCLS0542, FIG. 5) linearized by digestion with NcoI and EagI were used to transform the yeast Saccharomyces cerevisiae strain FYC2-6A (MATα, trp1063, leu2Δ1, his3Δ200) using a high efficiency LiAc transformation protocol (Gietz and Woods, Methods Enzymol., 2002, 350, 87-96). An intact coding sequence containing both groups of mutations is generated by in vivo homologous recombination in yeast.

[0813] c) Mating of Meganuclease Expressing Clones and Screening in Yeast

[0814] Screening was performed as described previously (Arnould et al., J. Mol. Biol., 2006, 355, 443-458). Mating was performed using a colony gridder (QpixII, GENETIX). Variants were gridded on nylon filters covering YPD plates, using a low gridding density (4-6 spots/cm²). A second gridding process was performed on the same filters to spot a second layer consisting of the reporter-harboring yeast strain for the target of interest. Membranes were placed on solid agar YPD rich medium, and incubated at 30° C. for one night, to allow mating. Next, filters were transferred to synthetic medium, lacking leucine and tryptophan, with galactose (2%) as a carbon source, and incubated for five days at 37° C., to select for diploids carrying the expression and target vectors. After 5 days, filters were placed on solid agarose medium with 0.02% X-Gal in 0.5 M sodium phosphate buffer, pH 7.0, 0.1% SDS, 6% dimethyl formamide (DMF), 7 mM β-mercaptoethanol, 1% agarose, and incubated at 37° C., to monitor β-galactosidase activity. Results were analyzed by scanning and quantification was performed using appropriate software.

[0815] d) Sequencing of Variants

[0816] To recover the variant expression plasmids, yeast DNA was extracted using standard protocols and used to transform E. coli. Sequencing of variant ORFs was then performed on the plasmids by MILLEGEN SA. Alternatively, ORFs were amplified from yeast DNA by PCR (Akada et al., Biotechniques, 2000, 28, 668-670), and sequencing was performed directly on the PCR product by MILLEGEN SA.

[0817] B) Results

[0818] I-CreI combinatorial variants were constructed by associating mutations at positions 44, 68, 70, 75 and 77 from proteins cleaving 5TAC_P with the 28, 30, 32, 33, 38 and 40 mutations from proteins cleaving 10TGC_P on the I-CreI scaffold, resulting in a library of complexity 1150. Examples of combinatorial variants are displayed in Table LXIV. This library was transformed into yeast and 4608 clones (4 times the diversity) were screened for cleavage against the HBV3.3 DNA target (ctgccttacgt_P, SEQ ID NO: 725). A total of 550 positive clones were found to cleave HBV3.3. Sequencing and validation by secondary screening of 186 of the best I-CreI variants resulted in the identification of 120 different novel endonucleases. Examples of positives are shown in FIG. 71. The sequence of several of the variants identified display non parental combinations at positions 28, 30, 32, 33, 38, 40 or 44, 68, 70, 75, 77 as well as additional mutations (see Examples Table LXV). Such variants likely result from PCR artifacts during the combinatorial process. Alternatively, the variants may be I-CreI combined variants resulting from micro-recombination between two original variants during in vivo homologous recombination in yeast.

TABLE LXIV
Panel of variants* theoretically present in the combinatorial library

| Amino | | | | | | | | | | | |
|---|---|---|---|---|---|---|---|---|---|---|---|
| acids at | | | | | | | | | | | |
| positions | | | | | | | | | | | |
| 44, 68, 70, | | | | | | | | | | | |
| 75 and 77 | | | | | | | | | | | |
| (ex: AYSRT | | | | | | | | | | | |
| stands for | | | | | | | | | | | |
| A44, Y68, | Amino acids at positions 28, 30,32, 33, 38 and 40 | | | | | | | | | | |
| S70, | (ex: KNSSSS stands for K28, N30, S32, S33, S38 and S40) | | | | | | | | | | |
| R75 arid T77) | KNSSSS | KNTTQS | KNSTAS | KNSTSS | KHSCQS | KNSCSS | KNSCAS | KNSVHS | KNSCTS | KNTCQS | KNSTTS |
| AYSRT | + | + | | | + | + | | | | | |
| ARNNI | | | | | | | | | | | |
| ATRNI | | | | | | | | | | | |
| AHRNI | | | | | | + | | | | | |
| ARGNI | | | | | | | | | | | |
| NHRNI | | | | | | + | | | | | |
| AKNNI | | | | | | | | | | | |
| NARNI | | | | | | | | | | | |
| NKRNI | | | | | | | | | | | |
| NRSRY | | | | | | | + | | | | |
| AYSRI | | | + | | + | + | + | + | + | + | |
| NRSRS | | | | | | | + | | | | |
| NKSRN | | | | | | + | + | | | | |
| NRSRN | | | | | | + | + | | | | |
| ARSRN | | | | | | + | | | | | |
| ARSRL | | | | | | | | | | | |
| ARSRV | | | | | | | | | | | |
| NASRY | | | | | | | | | | | |
| NASRT | | | | | | | | | | | |
| NYSRV | | | + | | | | | + | | + | |
| NRRNI | | | | | | | | | | | |
| NYSRY | + | + | + | + | + | + | | + | + | + | + |
| NTSRI | | | | | | | | | | | |
| AYSRV | | | + | | | | + | | + | + | |

*Only 264 out of the 1150 combinations are displayed.
+ indicates that a functional combinatorial variant cleaving the HBV3.4 target was found among the identified positives.

TABLE LXV
I-CreI variants capable of cleaving the HBV3.3
DNA target.

| Amino acids at positions 28, 30, 32, | |
|---|---|
| 33, 38, 40/44, 68, 70, 75 and 77 | |
| of the I-CreI variants | |
| (ex: KNSSRH/NYSRY stands for | SEQ |
| K28, N30, S32 , S33 , R38, H40/ | ID |
| N44, Y68, S70, R75 and Y77) | NO: |
| KNSSRH/NYSRY | 730 |
| KNSSRQ/AYSRI | 731 |
| KNSCRS/AYSRT | 732 |
| KNSSRE/NYSRY | 733 |
| KNSSRQ/NYSRV | 734 |

### EXAMPLE 25

### Making of Meganucleases Cleaving HBV3.4

[0819] This example shows that I-CreI variants can cleave the HBV3.4 DNA target sequence derived from the right part of the HBV3.2 target in a palindromic form (FIG. 70). All target sequences described in this example are 22 bp palindromic sequences. Therefore, they will be described only by the first 11 nucleotides, followed by the suffix _P (for example, HBV3.4 will be called ttctcttccgt_P).

[0820] HBV3.4 is similar to 5TCC_P at positions ±1, ±2, ±3, ±4, ±5 and to 10TCT_P at positions ±1, ±2, ±3, ±8, ±9 and ±10. It was hypothesized that positions ±6, ±7 and ±11 would have little effect on the binding and cleavage activity. Variants able to cleave 5TCC_P were obtained by mutagenesis of I-CreI N75 at positions 24, 44, 68, 70, 75 and 77, as described previously (Arnould et al., J. Mol. Biol., 2006, 355, 443-458; Smith et al. Nucleic Acids Res., 2006, 34, e149; International PCT Applications WO 2006/097784, WO 2006/097853, WO 2007/060495 and WO 2007/049156). Variants able to cleave the 10TCT_P target were obtained by mutagenesis of I-CreI N75 or D75, at positions 28, 30, 32, 33, 38, 40 and 70, as described previously in Smith et al. Nucleic Acids Res., 2006, 34, e149; International PCT Applications WO 2007/060495 and WO 2007/049156.

[0821] Both sets of proteins are mutated at position 70. However, the existence of two separable functional subdomains was hypothesized. This implies that this position has little impact on the specificity at bases 10 to 8 of the target. Mutations at positions 24 found in variants cleaving the 5TCC_P target will be lost during the combinatorial process. But it was hypothesized that this will have little impact on the capacity of the combined variants to cleave the HBV3.4 target.

[0822] Therefore, to check whether combined variants could cleave the HBV3.4 target, mutations at positions 44, 68, 70, 75 and 77 from proteins cleaving 5TCC_P were combined with the 28, 30, 32, 33, 38 and 40 mutations from proteins cleaving 10TCT_P.

[0823] A) Material and Methods

[0824] a) Construction of Target Vector

[0825] The experimental procedure is as described in Example 24, with the exception that an oligonucleotide corresponding to the HBV3.4 target sequence was used: 5′ tggcatacaagttttttctcttccgtacgacgtaaagacaatcgtctgtca 3′ (SEQ ID NO: 729).

[0826] b) Construction of Combinatorial Variants

[0827] I-CreI variants cleaving 10TCT_P or 5TCC_P were previously identified, as described in Smith et al. Nucleic Acids Res., 2006, 34, e149; International PCT Applications WO 2007/060495 and WO 2007/049156, and Arnould et al., J. Mol. Biol., 2006, 355, 443-458; International PCT Applications WO 2006/097784 and WO 2006/097853, respectively for the 10TCT_P and 5TCC_P targets. In order to generate I-CreI derived coding sequences containing mutations from both series, separate overlapping PCR reactions were carried out that amplify the 5′ end (aa positions 1-43) or the 3′ end (positions 39-167) of the I-CreI coding sequence. For both the 5′ and 3′ end, PCR amplification is carried out using primers (Gal10F 5′-gcaactttagtgctgacacatacagg-3′ (SEQ ID NO: 263) or Gal10R 5′-acaaccttgattggagacttgacc-3′ (SEQ ID NO: 264)) specific to the vector (pCLS1107, FIG. 6) and primers (assF 5′-ctannnttgaccttt-3′ (SEQ ID NO: 265) or assR 5′-aaaggtcaannntag-3′(SEQ ID NO: 266)), where nnn codes for residue 40, specific to the I-CreI coding sequence for amino acids 39-43. The PCR fragments resulting from the amplification reaction realized with the same primers and with the same coding sequence for residue 40 were pooled. Then, each pool of PCR fragments resulting from the reaction with primers Gal10F and assR or assF and Gal10R was mixed in an equimolar ratio. Finally, approximately 25 ng of each final pool of the two overlapping PCR fragments and 75 ng of vector DNA (pCLS1107, FIG. 6) linearized by digestion with DraIII and NgoMIV were used to transform the yeast Saccharomyces cerevisiae strain FYC2-6A (MATα, trp1Δ63, leu2Δ1, his3Δ200) using a high efficiency LiAc transformation protocol (Gietz and Woods, Methods Enzymol., 2002, 350, 87-96). An intact coding sequence containing both groups of mutations is generated by in vivo homologous recombination in yeast.

[0828] c) Mating of Meganuclease Expressing Clones and Screening in Yeast

[0829] Screening was performed as described previously (Arnould et al., J. Mol. Biol., 2006, 355, 443-458). Mating was performed using a colony gridder (QpixII, GENETIX). Variants were gridded on nylon filters covering YPD plates, using a low gridding density (4-6 spots/cm²). A second gridding process was performed on the same filters to spot a second layer consisting of the reporter-harboring yeast strain for the target of interest. Membranes were placed on solid agar YPD rich medium, and incubated at 30° C. for one night, to allow mating. Next, filters were transferred to synthetic medium, lacking tryptophan, including G418, with galactose (2%) as a carbon source, and incubated for five days at 37° C., to select for diploids carrying the expression and target vectors. After 5 days, filters were placed on solid agarose medium with 0.02% X-Gal in 0.5 M sodium phosphate buffer, pH 7.0, 0.1% SDS, 6% dimethyl formamide (DMF), 7 mM β-mercaptoethanol, 1% agarose, and incubated at 37° C., to monitor β-galactosidase activity. Results were analyzed by scanning and quantification was performed using appropriate software.

[0830] d) Sequencing of Variants

[0831] The experimental procedure is as described in Example 24.

[0832] B) Results

[0833] I-CreI combinatorial variants were constructed by associating mutations at positions 44, 68, 70, 75 and 77 from proteins cleaving 5TCC_P with the 28, 30, 32, 33, 38 and 40 mutations from proteins cleaving 10TCT_P on the I-CreI scaffold, resulting in a library of complexity 1196. Examples of combinatorial variants are displayed in Table LXVI. This library was transformed into yeast and 4608 clones (3.8 times the diversity) were screened for cleavage against the HBV3.4 DNA target (ttctatccgt_P, SEQ ID NO: 726). A total of 257 positive clones were found to cleave HBV3.4. Sequencing and validation by secondary screening of 178 of the best I-CreI variants resulted in the identification of 98 different novel endonucleases. Examples of positives are shown in FIG. 72. The sequence of several of the variants identified display non parental combinations at positions 28, 30, 32, 33, 38, 40 or 44, 68, 70, 75, 77 as well as additional mutations (see examples Table LXVII). Such variants likely result from PCR artifacts during the combinatorial process. Alternatively, the variants may be I-CreI combined variants resulting from micro-recombination between two original variants during in vivo homologous recombination in yeast.

TABLE LXVI
Panel of variants* theoretically present in the combinatorial
library

| Amino acids at | | | | | | | | | | |
|---|---|---|---|---|---|---|---|---|---|---|
| positions 44, 68, 70, | | | | | | | | | | |
| 75 and 77 | | | | | | | | | | |
| (ex: KHENI stands for | Amino acids at positions 28, 30,32, 33, 38 and 40 | | | | | | | | | |
| K44, H68, E70, | (ex: KNSCYS stands for K28, N30, S32, C33, Y38 and S40) | | | | | | | | | |
| N75 and I77) | KNSCYS | KNSGYS | KNTTQS | KHSSQS | KQSGQS | KNSSWS | KNSTSS | KNSCSS | KNSCCS | KNSGTS |
| KNENI | + | | | | | | | | | |
| KHSNI | | | | | | | | | | |
| KSSNI | | | | | | | | | | |
| KQSNI | | | | | | | | | | |
| NHNNI | | | | | | | | | | |
| KNDNI | | | | | | | | | | |
| KASNT | | | | | | | | | | |
| KYSNQ | + | + | | | | + | | + | + | |
| QASNR | | | | | | | | | | |
| KYSYN | + | + | | | | | | | | |
| KYSNY | + | + | | | | | | | | |
| RYYYA | | | | | | | | | | |
| KYSNV + 45M | + | + | | | | | | | | |
| QDSSR | | | | | | | | | | |
| KNSNI | | + | | | | | | | | |
| QGGNI | | | | | | | | | | |
| KQSNT | | | | | | | | | | |
| KANNI | | | | | | | | | | |
| KRHNI | | | | | | | | | | |
| KRQNI | | | | | | | | | | |
| QRSYR | | | | | | | | | | |
| KYSNV | + | | | | | | | | | |

*Only 220 out of the 1196 combinations are displayed.
+ indicates that a functional combinatorial variant cleaving the HBV3.4 target was found among the identified positives.

TABLE LXVII
I-CreI variants with additional mutations capable
of cleaving the HBV3.4 DNA target.

| Amino acids at positions 28, 30, 32, | |
|---|---|
| 33, 38, 40/44, 68, 70, 75 and 77 | |
| of the I-CreI variants | |
| (ex: KNSSYS/KHNNI stands for | SEQ |
| K28, N30, S32 , S33 , Y38, S40/K44, | ID |
| H68, N70, N75 and 177) | NO: |
| KNSSYS/KHNNI | 736 |
| KNSSWS/KYSNQ | 737 |
| KQSAQS/QYSYR | 738 |
| KNSCAS/KYSNY | 739 |
| KNSCCS/KYSNI | 740 |

### EXAMPLE 26

### Making of Meganucleases Cleaving HBV3.2

[0834] I-CreI variants able to cleave each of the palindromic HBV3.2 derived targets (HBV3.3 and HBV3.4) were identified in Example 24 and Example 25. Pairs of such variants (one cutting HBV3.3 and one cutting HBV3.4) were coexpressed in yeast. Upon co-expression, there should be three active molecular species, two homodimers, and one heterodimer. It was assayed whether the heterodimers that should be formed, cut the HBV3.2 and the non palindromic HBV3 targets.

[0835] A) Materials and Methods

[0836] a) Construction of Target Vector

[0837] The experimental procedure is as described in Example 10, with the exception that an oligonucleotide corresponding to the HBV3.2 target sequence: 5′ tggcatacaagtttcctgccttacgtacggaagagaaacaatcgtctgtca 3′(SEQ ID NO: 741) or the HBV3 target sequence: 5′ tggcatacaagtttcctgccttacttaggaagagaaacaatcgtctgtca 3′ (SEQ ID NO: 742) was used.

[0838] b) Co-Expression of Variants

[0839] Yeast DNA was extracted from variants cleaving the HBV3.4 target in the pCLS1107 expression vector using standard protocols and was used to transform E. coli. The resulting plasmid DNA was then used to transform yeast strains expressing a variant cutting the HBV3.3 target in the pCLS0542 expression vector. Transformants were selected on synthetic medium lacking leucine and containing G418.

[0840] c) Mating of Meganucleases Co-Expressing Clones and Screening in Yeast

[0841] Mating was performed using a colony gridder (QpixII, Genetix). Variants were gridded on nylon filters covering YPD plates, using a low gridding density (4-6 spots/cm²). A second gridding process was performed on the same filters to spot a second layer consisting of reporter-harboring yeast strain for the target of interest. Membranes were placed on solid agar YPD rich medium, and incubated at 30° C. for one night, to allow mating. Next, filters were transferred to synthetic medium, lacking leucine and tryptophan, including G418, with galactose (2%) as a carbon source, and incubated for five days at 37° C., to select for diploids carrying the expression and target vectors. After 5 days, filters were placed on solid agarose medium with 0.02% X-Gal in 0.5 M sodium phosphate buffer, pH 7.0, 0.1% SDS, 6% dimethyl formamide (DMF), 7 mM β-mercaptoethanol, 1% agarose, and incubated at 37° C., to monitor β-galactosidase activity. Results were analyzed by scanning and quantification was performed using appropriate software.

[0842] B) Results

[0843] Co-expression of variants cleaving the HBV3.4 target (7 variants chosen among those described in Table LXVI and Table LXVII) and four variants cleaving the HBV3.3 target (described in Table LXIV and Table LXV) resulted in efficient cleavage of the HBV3.2 target in all cases (FIG. 73). However, none of these combinations were able to cut the HBV3 natural target that differs from the HBV3.2 sequence by 2 bp at positions 1 and 2 (FIG. 70). Functional combinations cleaving HBV3.2 are summarized in Table LXVIII.

TABLE LXVIII
Cleavage of the HBV3.2 target by the heterodimeric variants

| Variant HBV3.4, | | | | |
|---|---|---|---|---|
| amino acids at | | | | |
| positions 28, 30, | | | | |
| 32, 33, 38, 40/44 | Variant HBV3.3, | | | |
| 68 70 75 77 | amino acids at positions 28, 30, 32, 33, 38, 40/44, 68, 70, 75 and 77 | | | |
| (ex KNSGYS/KYSNY: | (ex: KNSCSS/NYSRY stands for K28, N30, S32, C33, S38, | | | |
| stands for K28, N30, | S40/N44, Y68, S70, R75 and Y77) | | | |
| S32, G33, Y38, S40/ | KNSCSS/ | KNSCRS/ | KNSCSS/ | KNSSRE/ |
| K44, Y68, | NYSRY | AYSRT | NRSRN | NYSRY |
| S70, N75 and Y77) | (SEQ ID NO: 743) | (SEQ ID NO: 732) | (SEQ ID NO: 744) | (SEQ ID NO: 733) |
| KNSGYS/ | + | + | + | + |
| KYSNY (SEQ ID NO: | | | | |
| 745). | | | | |
| KNSCYS/ | + | + | + | + |
| KYSNV + 45M | | | | |
| (SEQ ID NO: 746) | | | | |
| KNSGYS/ | + | + | + | + |
| KYSNV + 45M | | | | |
| (SEQ ID NO: 747) | | | | |
| KNSSYS/ | + | + | + | + |
| KHNNI | | | | |
| (SEQ ID NO: 736) | | | | |
| KNSCYS/ | + | + | + | + |
| KYSNY | | | | |
| (SEQ ID NO: 748) | | | | |
| KNSGYS/ | + | + | + | + |
| KYSNQ | | | | |
| (SEQ ID NO: 749) | | | | |
| KNSCYS/ | + | + | + | + |
| KYSNQ | | | | |
| (SEQ ID NO: 750) | | | | |

+ indicates a functional combination

### EXAMPLE 27

### Improvement of Meganucleases Cleaving HBV3.3 by Random Mutagenesis

[0844] I-CreI variants able to cleave the HBV3.2 target by assembly of variants cleaving the palindromic HBV3.3 and HBV3.4 target have been previously identified in Example 26. However, none of these variants were able to cleave the HBV3 target.

[0845] Therefore, four combinatorial variants cleaving HBV3.3 were mutagenized, and variants were screened for cleavage activity of the HBV3.5. HBV3.5 is a pseudo-palindromic target similar to HBHV3.3 except that it contains the tttt sequence at positions −2 to 2 (FIG. 70). The Inventors have previously observed that the association of a variant cleaving a pseudo-palindromic target with a wild-type sequence at positions −2 to 2 with a variant cleaving the other pseudo-palindromic target will increase the probability of cleavage of the target of interest. According to the structure of the I-CreI protein bound to its target, there is no contact between the 4 central base pairs (positions −2 to 2) and the I-CreI protein (Chevalier et al., Nat. Struct. Biol., 2001, 8, 312-316; Chevalier and Stoddard, Nucleic Acids Res., 2001, 29, 3757-3774; Chevalier et al., J. Mol. Biol., 2003, 329, 253-269). Thus, it is difficult to rationally choose a set of positions to mutagenize, and mutagenesis was performed on the whole protein.

[0846] Thus, in a first step, proteins cleaving HBV3.3 were mutagenized, and in a second step, it was assessed whether they displayed increased activity with the target HBV3.5.

[0847] A) Material and Methods

[0848] a) Construction of Target Vector

[0849] The experimental procedure is as described in Example 24, with the exception that an oligonucleotide corresponding to the HBV3.5 target sequence was used: 5′ tggcatacaagtttcctgcctacttttgtaaggcaggcaatcgtctgtca 3′ (SEQ ID NO: 751).

[0850] b) Construction of Libraries by Random Mutagenesis

[0851] Random mutagenesis was performed on a pool of chosen variants, by PCR using Mn²⁺. PCR reactions were carried out that amplify the I-CreI coding sequence using the primers preATGCreFor (5′-gcataaattactatacttctatagacacgcaaacacaaatacacagcggccttgccacc-3′; SEQ ID NO: 169) and ICreIpostRev (5′-ggctcgaggagctcgtctagaggatcgctcgagttatcagtcggccgc-3′; SEQ ID NO: 170), which are common to the pCLS0542 (FIG. 5) and pCLS1107 (FIG. 6) vectors. Approximately 25 ng of the PCR product and 75 ng of vector DNA (pCLS542, FIG. 5) by digestion with NcoI and EagI were used to transform the yeast Saccharomyces cerevisiae strain FYC2-6A (MATα, trp1Δ3, leu2Δ1, his3Δ200) using a high efficiency LiAc transformation protocol (Gietz and Woods, Methods Enzymol., 2002, 350, 87-96). Expression plasmids containing an intact coding sequence for the I-CreI variant were generated by in vivo homologous recombination in yeast.

[0852] c) Mating of Meganuclease Expressing Clones and Screening in Yeast

[0853] The experimental procedure is as described in Example 24.

[0854] d) Sequencing of Variants

[0855] The experimental procedure is as described in Example 24.

[0856] B) Results

[0857] Four variants cleaving HBV3.3, I-CreI 33C,38S,44N,68Y,70S,75R,77Y; I-CreI 33C,38S,44N,70S,75R77N; I-CreI 33C,38R,44A,68Y,70S,75R,77T and I-CreI 33 S,38R,40E,44N,68Y,70S,75R,77Y also called KNSCSS/NYSRY (SEQ ID NO: 743), KNSCSS/NRSRN (SEQ ID NO: 744), KNSCRS/AYSRT (SEQ ID NO: 732) and KNSSRE/NYSRY (SEQ ID NO: 733) according to the nomenclature of Table LXIV and Table LXV, were pooled, randomly mutagenized and transformed into yeast. 2304 transformed clones were then screened for cleavage against the HBV3.5 DNA target. 58 clones were found to cleave the HBV3.5 target more efficiently than the original variant. An example of positives is shown in FIG. 74. Sequencing of these positive clones indicates that 28 distinct variants were identified (see examples Table LXIX).

TABLE LXIX
Functional variant combinations displaying strong cleavage activity
for HBV3.5.
Optimized* Variants HBV3.3
(SEQ ID NO: 752 to 759)

26R 33C 38S 44N 68Y 70S 75R 77Y 81T
33C 38R 44A 68Y 70S 75R 77T 132V
33C 38R 44A 68Y 70S 75R 77Y
33C 38R 44A 57N 68Y 70S 75R 77Y 80G
33C 38R 44A 68Y 70S 75R 77T 83S
17A 33C 38R 44A 68Y 70S 75R 77T
33C 38R 44A 62L 68Y 70S 75R 77Y
33C 38R 44N 68Y 70S 72P 75R 77Y
* Mutations resulting from random mutagenesis are in bold.

### EXAMPLE 28

### Improvement of Meganucleases Cleaving HBV3.4 by Random Mutagenesis

[0858] As a complement to Example 27 we also decided to perform random mutagenesis with variants that cleave HBV3.4. The mutagenized proteins cleaving HBV3.4 were then tested to determine if they could efficiently cleave the pseudo-palindromic target HBV3.6

[0859] A) Material and Methods

[0860] a) Construction of Target Vector

[0861] The experimental procedure is as described in Example 24, with the exception that an oligonucleotide corresponding to the HBV3.6 target sequence was used: 5′ tggcatacaagtatttctatcatttggaagagaaacaatcgtctgtca 3′ (SEQ ID NO: 760).

[0862] b) Construction of Libraries by Random Mutagenesis

[0863] Random mutagenesis was performed on a pool of chosen variants, by PCR using Mn²⁺. PCR reactions were carried out that amplify the I-CreI coding sequence using the primers preATGCreFor (5′-gcataaattactatacttctatagacacgcaaacacaaatacacagcggccttgccacc-3′; SEQ ID NO: 169) and ICreIpostRev (5′-ggctcgaggagctcgtctagaggatcgctcgagttatcagtcggccgc-3′; SEQ ID NO: 170). Approximately 25 ng of the PCR product and 75 ng of vector DNA (pCLS1107, FIG. 6) linearized by digestion with Drain and NgoMIV were used to transform the yeast Saccharomyces cerevisiae strain FYC2-6A (MATα, trp1Δ63, leu2Δ1, his3Δ200) using a high efficiency LiAc transformation protocol (Gietz and Woods, Methods Enzymol., 2002, 350, 87-96). Expression plasmids containing an intact coding sequence for the I-CreI variant were generated by in vivo homologous recombination in yeast.

[0864] c) Mating of Meganuclease Expressing Clones and Screening in Yeast

[0865] The experimental procedure is as described in Example 24.

[0866] d) Sequencing of Variants

[0867] The experimental procedure is as described in Example 24.

[0868] B) Results

[0869] Seven variants cleaving HBV3.4 (I-CreI 33C,38Y,44K,45M,68Y,70S,75N,77V I-CreI 33C,38Y,44K,68Y,70S,75N,77Y, I-CreI 33 G,38Y,44K,68Y,70S,75N,77Q, I-CreI 33G,38Y,44K,68Y,70S,75N,77Y, I-CreI 33S,38Y,44K,68H,70N,75N, I-CreI 33G,38Y,44K,45M,68Y,70S,75N,77V, and I-CreI 33C,38Y,44K,68Y,70S,75N,77Q also called KNSCYS/KYSNV+45M (SEQ ID NO: 746), KNSCYS/KYSNY (SEQ ID NO: 748), KNSGYS/KYSNQ (SEQ ID NO: 479), KNSGYS/KYSNY (SEQ ID NO: 745), KNSSYS/KHNNI (SEQ ID NO: 736), KNSGYS/KYSNV+45M (SEQ ID NO: 747), and KNSCYS/KYSNQ (SEQ ID NO: 750), respectively, according to the nomenclature of Table LXVI and Table LXVII) were pooled, randomly mutagenized and transformed into yeast. 2304 transformed clones were then screened for cleavage against the HBV3.6 DNA target. 114 clones were found to cleave the HBV3.6 target more efficiently than the original variant. An example of positives is shown in FIG. 75. Sequencing of these positive clones indicates that 65 distinct variants were identified (see examples Table LXX).

TABLE LXX
Functional variant combinations displaying strong cleavage activity
for HBV3.6.
Optimized Variants HBV3.4
(SEQ ID NO: 761 to 765 and 767 to 771)

2D 33S 38Y 44K 68Y 70S 75N 77Y 140M
33C 38Y 44K 45M 54L 68Y 70S 75N 77Y
33C 38Y 44K 64I 68Y 70S 75N 77Y 85R
33C 38Y 44K 45M 68Y 70S 75N 77V 105A
33C 38Y 44K 45M 59A 68Y 70S 75N 77V
33C 38Y 44K 45M 68Y 70S 75N 77V 85R
33S 38Y 44K 45M 68Y 70S 75N 77V 86T
33S 38Y 44K 68Y 70S 75N 77L
33C 38Y 44K 57E 68Y 70S 75N 77Y
32F 33C 38Y 44K 45M 68Y 70S 75N 77V
* Mutations resulting from random mutagenesis are in bold.

### EXAMPLE 29

### Making of Meganucleases Cleaving HBV3

[0870] Optimized I-CreI variants able to cleave each of the pseudo-palindromic targets HBV3.5 and HBV3.6 were identified in Example 27 and Example 28. Pairs of such optimized variants (one cutting HBV3.5 and one cutting HBV3.6) were co-expressed in yeast. Upon co-expression, there should be three active molecular species, two homodimers, and one heterodimer. It was determined whether the heterodimers that should be formed cut the non-palindromic HBV3 target.

[0871] A) Materials and Methods

[0872] a) Co-Expression of Variants

[0873] Yeast DNA was extracted from optimized HBV3.3 variants cleaving the HBV3.5 target (pCLS542 expression vector) as well as those optimized HBV3.4 variants cleaving HBV3.6 (pCLS1107 expression vector) using standard protocols and were used to transform E. coli. Plasmid DNA derived from an optimized HBV3.3 variant and an optimized HBV3.4 variant was then co-transformed into the yeast Saccharomyces cerevisiae strain FYC2-6A (MATα, trp1Δ63, leu2Δ1, his3Δ200) using a high efficiency LiAc transformation protocol (Gietz and Woods, Methods Enzymol., 2002, 350, 87-96). Transformants were selected on synthetic medium lacking leucine and containing G418.

[0874] b) Mating of Meganucleases Coexpressing Clones and Screening in Yeast

[0875] The experimental procedure is as described in Example 26.

[0876] B) Results

[0877] Co-expression of an optimized HBV3.3 variants cleaving the HBV3.5 target (7 variants chosen among those described in Example 27) and eleven optimized HBV3.4 variants cleaving the HBV3.6 target (described in Example 28) resulted in efficient cleavage of the HBV3 target in some cases (FIG. 76). Functional combinations cleaving HBV3 are summarized in Table LXXI.

TABLE LXXI
Cleavage of the HBV3 target by the heterodimeric variants

| | Optimized HBV3.3 variant cleaving HBV3.5 | | | | | | |
|---|---|---|---|---|---|---|---|
| | 26R 33C 38S | | | | | | |
| Optimized | 44N 68Y 70S | 33C 38R 44A | 33C 38R 44A | 33C 38R 44A | 33C 38S 44N | 31H 33C 38R | 33C 38R 44A |
| HBV3.4 | 75R 77Y | 68Y 70S 75R | 68Y 70S 75R | 68Y 70S 75R | 68H 70S 75R | 44A 68Y 70S | 57N 68Y 70S |
| variants | 81T | 77T 132V | 77T 83S | 77Y 154G | 77N 79R | 75R 77Y | 75R 77Y 80G |
| cleaving | (SEQ ID | (SEQ ID NO: | (SEQ ID NO: | (SEQ ID NO: | (SEQ ID NO: | (SEQ ID NO: | (SEQ ID NO: |
| HBV3.6 | NO: 752) | 753) | 756) | 772) | 773) | 774) | 755) |
| 33S 38Y 44K | + | + | + | + | | | |
| 68Y 70S 75N | | | | | | | |
| 77L | | | | | | | |
| (SEQ ID NO: | | | | | | | |
| 770) | | | | | | | |
| 33C 38Y 44K | + | + | + | + | | | |
| 45M 68Y 70S | | | | | | | |
| 75N 77V 121R | | | | | | | |
| (SEQ ID NO: | | | | | | | |
| 775) | | | | | | | |
| 33C 38Y 44K | + | + | + | + | | | |
| 45M 59A 68Y | | | | | | | |
| 70S 75N 77V | | | | | | | |
| (SEQ ID NO: | | | | | | | |
| 765) | | | | | | | |
| 33C 38Y 44K | + | + | + | + | | | |
| 45M 61V 68Y | | | | | | | |
| 70S 75N 77V | | | | | | | |
| 85Y | | | | | | | |
| (SEQ ID NO: | | | | | | | |
| 776) | | | | | | | |
| 33C 38Y 44K | + | + | + | + | | | |
| 64I 68Y 70S | | | | | | | |
| 75N 77Y 85R | | | | | | | |
| (SEQ ID NO: | | | | | | | |
| 763) | | | | | | | |
| 33S 38Y 44K | + | + | + | + | | | |
| 45M 68Y 70S | | | | | | | |
| 75N 77V 81T | | | | | | | |
| (SEQ ID NO: | | | | | | | |
| 777) | | | | | | | |
| 31R 33C 38Y | + | + | + | + | | | |
| 44K 68Y 70S | | | | | | | |
| 73A 75N 77V | | | | | | | |
| (SEQ ID NO: | | | | | | | |
| 778) | | | | | | | |
| 2S 33C 38Y | + | + | | + | | | |
| 44K 68Y 70S | | | | | | | |
| 75N 77Y 89A | | | | | | | |
| (SEQ ID NO: | | | | | | | |
| 779) | | | | | | | |
| 33S 38Y 44K | + | + | + | + | | | |
| 45M 68Y 70S | | | | | | | |
| 75N 77V 86T | | | | | | | |
| (SEQ ID NO: | | | | | | | |
| 768) | | | | | | | |
| 33C 38Y 44K | + | + | + | + | | | |
| 45M 68Y 70S | | | | | | | |
| 75N 77V 105A | | | | | | | |
| (SEQ ID NO: | | | | | | | |
| 764) | | | | | | | |
| 2D 33S 38Y | + | + | + | + | | | |
| 44K 68Y 70S | | | | | | | |
| 75N 77Y 140M | | | | | | | |
| (SEQ ID NO: | | | | | | | |
| 761) | | | | | | | |

+ indicates a functional combination

### EXAMPLE 30

### Improvement of Meganucleases Cleaving the HBV3 Target Site by Random Mutagenesis of I-CreI Variants Cleaving the HBV3.4 Target and Assembly with Variants Cleaving HBV3.3 in CHO Cells

[0878] I-CreI variants able to cleave the HBV3 target in yeast were previously identified in Example 29 by assembly of optimized variants cleaving HBV3.3 and optimized variants cleaving HBV3.4.

[0879] In this example, it was determined if the activity of the meganucleases could be increased and at the same time establish if the meganucleases are active in CHO cells. The variants cleaving HBV3.4 described in Example 28 (Table LXX) were subjected to random mutagenesis and more efficient variants cleaving HBV3 in combination with variants cleaving HBV3.3 (identified in Example 27) were identified in CHO cells. The screen in CHO cells is a single-strand annealing (SSA) based assay where cleavage of the target by the meganucleases induces homologous recombination and expression of a LagoZ reporter gene (a derivative of the bacterial lacZ gene).

[0880] 1) Materials and Methods

[0881] a) Cloning of HBV3 Target in a Vector for CHO Screen

[0882] The target was cloned as follow: oligonucleotide corresponding to the HBV3 target sequence flanked by gateway cloning sequence was ordered from PROLIGO: 5′ tggcatacaagatcctgccttacattggaagagaaacaatcgtctgtca 3′ (SEQ ID NO: 742). Double-stranded target DNA, generated by PCR amplification of the single stranded oligonucleotide, was cloned using the Gateway protocol (INVITROGEN) into CHO reporter vector (pCLS1058, FIG. 11). Cloned target was verified by sequencing (MILLEGEN).

[0883] b) Construction of Libraries by Random Mutagenesis

[0884] I-CreI variants cleaving HBV3.4 were pooled and randomly mutagenized by PCR in the presence of Mn²⁺. Primers used are attB1-ICreIFor (5% ggggacaagtttgtacaaaaaagcaggcttcgaaggagatagaaccatggccaataccaaatataacaaagagttcc-3′; SEQ ID NO: 716) and attB2-ICreIRev (5′-ggggaccactttgtacaagaaagagggtttagtcggccgccggggaggatttcttcttacgc-3′; SEQ ID NO: 717). PCR products obtained were cloned in pcDNA6.2 from INVITROGEN (pCLS1768, FIG. 29), a vector for expression in CHO cells, using the Gateway protocol (INVITROGEN).

[0885] c) Re-Cloning of Meganucleases

[0886] The ORF of and I-CreI variants cleaving the HBV3.3 target were re-cloned in pCLS1768 (FIG. 29). ORFs were amplified by PCR on yeast DNA using the above described attB1-ICreIFor and attB2-ICreIRev primers. PCR products were cloned in CHO expression vector pcDNA6.2 from INVITROGEN (pCLS1768, FIG. 29) using the Gateway protocol (INVITROGEN). Resulting clones were verified by sequencing (MILLEGEN).

[0887] d) Extrachromosomal Assay in Mammalian Cells

[0888] CHO cells were transfected with Polyfect® transfection reagent according to the supplier's protocol (QIAGEN). 72 hours after transfection, culture medium was removed and 150 μl of lysis/revelation buffer for β-galactosidase liquid assay was added (typically 1 liter of buffer contained: 100 ml of lysis buffer (Tris-HCl 10 mM pH7.5, NaCl 150 mM, Triton X100 0.1%, BSA 0.1 mg/ml, protease inhibitors), 10 ml of Mg 100× buffer (MgCl₂ 100 mM, β-mercaptoethanol 35%), 110 ml ONPG 8 mg/ml and 780 ml of sodium phosphate 0.1M pH7.5). After incubation at 37° C., OD was measured at 420 nm. The entire process is performed on an automated Velocity11 BioCel platform. Positives clones resulting of the screen of libraries were secondary screened and verified by sequencing (MILLEGEN).

[0889] Per assay, 150 ng of target vector was cotransfected with 12.5 ng of each one of the variants (12.5 ng of variant cleaving palindromic HBV3.3 target and 12.5 ng of variant cleaving palindromic HBV3.4 target).

[0890] 2) Results

[0891] Four optimized variants cleaving HBV3.4 (33C,38Y,44K,45M,54L,68Y,70S,75N,77Y (SEQ ID NO: 762), 33S,38Y,44K,68Y,70S,75N,77L (SEQ ID NO: 769), 33S,38Y,44K,45M,68Y,70S,75N,77V,86T (SEQ ID NO: 768), and 2D,33S,38Y,44K,68Y,70S,75N,77Y,140M (SEQ ID NO: 761), according to the nomenclature of Table LXX in Example 28) were subjected to another round of optimization. They were pooled, randomly mutagenized and a library of new I-CreI variants was cloned in the pCLS1768 vector (FIG. 29) allowing expression of the variant in CHO cells. 3456 clones were screened using the extrachromosomal assay in CHO cells. The screen is carried out by co-transfection of 3 plasmids in CHO cells: one expressing a variant resulting from random mutagenesis of the variant cleaving HBV3.4, a second expressing a chosen variant cleaving HBV3.3 re-cloned in pCLS1768 (FIG. 29) and a third one containing the HBV3 target cloned in pCLS1058 (FIG. 11). The I-CreI variant cleaving HBV3.3 used for the screen of the library: I-CreI 26R,33C,38S,44N,68Y,70S,75R,77Y,81T, SEQ ID NO:752, according to Table LXIX in Example 27.

[0892] Six clones were found to trigger cleavage of the HBV3 target in the CHO assay when forming heterodimers with the optimized HBV3.3 variant (I-CreI 26R,33C,38S,44N,68Y,70S,75R,77Y,81T SEQ ID NO: 752) in a primary screen. The 6 clones (SEQ ID NO: 780 to 785) were validated in a secondary screen (FIG. 11) and sequenced (Table LXXII). In the secondary screen, the efficiency of the 6 clones was compared to one of the initial HBV3.4 variants (I-CreI 33S,38Y,44K,68Y,70S,75N,77L, SEQ ID NO: 769 according to Table LXX in Example 28) co-expressed with the optimized HBV3.3 variant (I-CreI 26R,33C,38S,44N,68Y,70S,75R,77Y,81T SEQ ID NO: 752). All six new refined HBV3.4 variants were able to cleave the HBV3 target with an efficacy superior to that observed with the heterodimer formed by the initial HBV3.4 variant (I-CreI 33S,38Y,44K,68Y,70S,75N,77L).

TABLE LXXII
I-CreI variants displaying improved cleavage activity for HBV3 DNA
target when forming heterodimers with HBV3.3 (I-CreI 26R, 33C, 38S,
44N, 68Y, 70S, 75R, 77Y, 81T).

| | | SEQ |
|---|---|---|
| Name | Sequence | ID NO |
| 3.4_A1 | 19S 33C 38Y 44K 68Y 70S 75N 77Q 96E 140M | 780 |
| 3.4_A5 | 19S 33C 38Y 44K 68Y 70S 75N 77Y | 781 |
| 3.4_A7 | 19S 33C 38Y 44K 68Y 70S 75N 77Q 140M | 782 |
| 3.4_E10 | 19S 33C 38R 44K 68Y 70S 75N 77Q 132M | 783 |
| 3.4_B4 | 19S 33C 38Y 44K 68Y 70S 75N 77Q | 784 |
| 3.4_D3 | 19S 33C 38Y 44K 61G 68Y 70S 75N 77Q 128C | 785 |

### EXAMPLE 31

### Improvement of Meganucleases Cleaving The HBV3 Target Site by Random Mutagenesis of I-CreI Variants Cleaving the HBV3.3 Target and Assembly with Variants Cleaving HBV3.4 in CHO Cells

[0893] As a complement to Example 30 we also decided to perform random mutagenesis with variants that cleave HBV3.3. The variants cleaving HBV3.3 described in Example 27 (Table LXIX) were subjected to random mutagenesis and more efficient variants cleaving HBV3 in combination with a variant cleaving HBV3.4 (identified in Example 30) were identified in CHO cells.

[0894] 1) Materials and Methods

[0895] a) Construction of Libraries by Random Mutagenesis

[0896] I-CreI variants cleaving HBV3.3 were pooled and randomly mutagenized by PCR in the presence of Mn²⁺ Primers used are attB1-ICreIFor (5′-ggggacaagtttgtacaaaaaagcaggcttcgaaggagatagaaccatggccaataccaaatataacaaagagttcc-3′; SEQ ID NO: 716) and attB2-ICreIRev (5′-ggggaccactttgtacaagaaagagggtttagtcggccgccggggaggatttcacttctcgc-3′; SEQ ID NO: 717). PCR products obtained were cloned in pcDNA6.2 from INVITROGEN (pCLS1768, FIG. 29), a vector for expression in CHO cells, using the Gateway protocol (INVITROGEN).

[0897] b) Extrachromosomal Assay in Mammalian Cells

[0898] Extrachromosomal assay in mammalian cells was performed as described in Example 30.

[0899] 2) Results

[0900] Four optimized variants cleaving HBV3.3 (26R,33C,38S,44N,68Y,70S,75R,77Y,81T (SEQ ID NO: 752), 33C,38R,44A,68Y,70S,75R,77T,132V (SEQ ID NO: 753), 33C,38R,44A,68Y,70S,75R,77T,83S (SEQ ID NO: 756), and 33C,38R,44A,57N,68Y,70S,75R,77Y,80G (SEQ ID NO: 755), according to the nomenclature of Table LXIX in Example 27) were subjected to a round of optimization. They were pooled, randomly mutagenized and a library of new I-CreI variants was cloned in the pCLS1768 vector allowing expression of the variant in CHO cells (FIG. 29). 2976 clones were screened using the extrachromosomal assay in CHO cells. The screen is carried out by co-transfection of 3 plasmids in CHO cells: one expressing a variant resulting from random mutagenesis of the variant cleaving HBV3.3, a second expressing a chosen variant cleaving HBV3.4 re-cloned in pCLS1768 (FIG. 29) and a third one containing the HBV3 target cloned in pCLS1058 (FIG. 11). The optimized I-CreI variant cleaving HBV3.4 (3.4_{—}134) was used for the screen of the library: 19S,33C,38Y,44K,68Y,70S,75N,77Q (SEQ ID NO: 784) according to Table LXXII in Example 29.

[0901] Six clones were found to trigger cleavage of the HBV3 target in the CHO assay when forming heterodimers with the HBV3.4 variant (I-CreI 19S,33C,38Y,44K,68Y,70S,75N,77Q, SEQ ID NO: 784) in a primary screen. The 6 clones (SEQ ID NO: 786 to 787 and 789 to 792) were validated in a secondary screen (FIG. 78) and sequenced (Table LXXIII). In the secondary screen, the efficiency of the 6 clones was compared to one of the initial HBV3.3 variants (I-CreI 26R,33C,38S,44N,68Y,70S,75R,77Y,81T, SEQ ID NO: 752, according to Table LXXVIII in Example 27) co-expressed with the HBV3.4 variant (I-CreI 19S,33C,38Y,44K,68Y,70S,75N,77Q, SEQ ID NO: 784). One of the new HBV3.3 variants (I-CreI 26R,33C,38S,44N,68Y,70S,75R,77Y,81T,139R, SEQ ID NO:791) was able to cleave the HBV3 target with an efficacy superior to that observed with the heterodimer formed by the initial HBV3.3 variant (I-CreI 26R,33C,38S,44N,68Y,70S,75R,77Y,81T, SEQ ID NO: 752).

TABLE LXXIII
I-CreI variants displaying improved cleavage activity for HBV3 DNA
target when forming heterodimers with HBV3.4 (I-CreI 19S, 33C, 38Y,
44K, 68Y,70S, 77Q).

| | | SEQ |
|---|---|---|
| Name | Sequence | ID NO |
| 3.3_B10 | 23V 26R 33C 38S 44N 68Y 70S 75R 77Y 81T | 786 |
| 3.3_C9 | 33C 34R 38R 44A 68Y 70S 75R 77T 81T 83S | 787 |
| 3.3_D3 | 26R 33C 38S 44N 68Y 70S 75R 77Y 81T 130G | 789 |
| 3.3_E9 | 26R 33C 38S 44N 53R 68Y 70S 75R 77Y 81T 89A | 790 |
| 3.3_F1 | 26R 33C 38S 44N 68Y 70S 75R 77Y 81T 139R | 791 |
| 3.3_G6 | 26R 33C 38S 44N 56G 68Y 70S 75R 77Y 81T | 792 |

### EXAMPLE 32

### Improvement of Meganucleases Cleaving the HBV3 DNA Target by Multiple Site-Directed Mutagenesis of HBV3.3 and HBV3.4 Variants

[0902] Optimized HBV3.3 and HBV3.4 variants able to cleave the HBV3 target in CHO cells when forming heterodimers were identified in Examples 30 and 31. However, these variants displayed cleavage activity for the HBV3 target that was inferior to that of the I-SceI meganuclease for its target. To try and further improve that activity of the HBV3 meganuclease, HBV3.3 and HBV3.4 variants were subjected to an additional step of optimization by introducing selected amino-acid substitutions.

[0903] Three amino-acid substitutions have been found in previous studies to enhance the activity of I-CreI derivatives: these mutations correspond to the replacement of Phenylalanine 54 with Leucine (F54L), Valine 105 with Alanine (V105A) and Isoleucine 132 with Valine (I132V). One, two or all three of these mutations were introduced into the coding sequence of proteins cleaving HBV3.3 and HBV3.4; and the resulting heterodimers were tested for their ability to induce cleavage of the HBV3 target in an extrachromosomal assay in CHO cells.

[0904] 1) Materials and methods

[0905] a) Construction of Site Directed Variants (Single Mutations)

[0906] Site-directed variants containing a single mutation were created by PCR. For example, to introduce the F54L substitution into the coding sequence of the variant, two separate overlapping PCR reactions were carried out that amplify the 5′ end (amino acid residues 1-59) or the 3′ end (amino acid residues 49-167) of the I-CreI coding sequence. For both the 5′ and 3′ end, PCR amplification is carried out using a primer with homology to the vector attB1-ICreIFor (5′-ggggacaagtttgtacaaaaaagcaggcttcgaaggagatagaaccatggccaataccaaatataacaaagagttcc-3′; SEQ ID NO: 717) and attB2-ICreIRev (5′-ggggaccactttgtacaagaaagctgggtttagtcggccgccggggaggatttcttcttctcgc-3′; SEQ ID NO: 718) and a primer specific to the I-CreI coding sequence for amino acids 49-59 that contain the substitution mutation F54L (F54LF: 5′-acccagcgccgttggctgctggacaaactagtg-3′ (SEQ ID NO: 656) or F54LR: 5′-cactagtttgtccagcagccaacggcgctgggt-3′ (SEQ ID NO: 657)). The resulting PCR products contain 33 bp of homology with each other. An intact I-CreI coding sequence is obtained by assembly PCR and subsequently cloned in pcDNA6.2 from INVITROGEN (pCLS1768, FIG. 29), a vector for expression in CHO cells, using the Gateway protocol (INVITROGEN). Resulting clones were verified by sequencing (MILLEGEN).

[0907] The same strategy is used with the following pair of oligonucleotides to create variants containing the V105A and I132V substitutions, respectively:
[0908] V105AF: 5′-aaacaggcaaacctggactgaaaattatcgaa-3′ and V105AR: 5′-ttcgataatlttcagagccaggtttgcctgttt-3′ SEQ ID NO: 661 and 662);
[0909] I132VF: 5′-acctgggtggatcaggttgcagctctgaacgat-3′ and I132VR: 5′-atcgttcagagctgcaacctgatccacccaggt-3′ SEQ ID NO: 663 and 664).

[0910] b) Construction of Site Directed Variants (Multiple Mutations)

[0911] To obtain multiple insertions of the F54L, V105A and I132V substitutions into the coding sequence of HBV3.3 and HBV3.4 variants, 4 groups of separate overlapping PCR reactions were carried out that amplify internal fragments of the I-CreI N75 coding sequence containing the sequences between the different mutations. As an example, for the multiple site directed mutagenesis for the insertion of the mutations F54L and V105A, PCR amplification is carried out using a forward primer specific to the I-CreI coding sequence for amino acids 49-59 either with or without the substitution F54L (F54LF: 5′-acccagcgccgttggctgctggacaaactagtg-3′ (SEQ ID NO: 656) and F54 wtF: 5′-acccagcgccgttggtttctggacaaactagtg-3′ (SEQ ID NO: 801)) and a reverse primer specific to the I-CreI coding sequence for amino acids 100-110 either with or without V105A (V105AR 5′-ttcgataattttcagagccaggtttgcctgttt-3′ (SEQ ID NO: 662) and V105 wtR 5′-ttcgataattttcagaaccaggtttgcctgttt-3′ (SEQ ID NO: 802)), leading to the generation of four different PCR fragments.

[0912] The same strategy was used with the following groups of oligonucleotides to create the other internal fragments:
[0913] attB1-ICreIFor (5′-ggggacaagtttgtacaaaaaagcaggcttcgaaggagatagaaccatggccaataccaaatataacaaagagacc-3′; SEQ ID NO: 716) with F54LR 5′-cactagtttgtccagcagccaacggcgctgggt-3′ (SEQ ID NO: 657) and F54 wtR 5′-cactagtttgtccagaaaccaacggcgctgggt-3′ (SEQ ID NO: 801)
[0914] V105AF: 5′-aaacaggcaaacctggctctgaaaattatcgaa-3′ (SEQ ID NO: 661) and V105 wtF: 5′-aaacaggcaaacctggttctgaaaattatcgaa-3′ (SEQ ID NO: 672) with I132VR 5′-atcgttcagagctgcaacctgatccacccaggt-3′ (SEQ ID NO: 664) and 1132 wtR 5′-atcgttcagagctgcaatctgatccacccaggt-3′ (SEQ ID NO: 667)
[0915] I132wtF: 5′-acctgggtggatcaggttgcagctctgaacgat-3′ (SEQ ID NO: 663) and I132 wtF: 5′-acctgggtggatcagattgcagctctgaacgat-3′ (SEQ ID NO: 766) with attB2-ICreIRev (5′-ggggaccactttgtacaagaaagctgggtttagtcggccgccggggaggatttcttcttctcgc-3′; (SEQ ID NO: 717).

[0916] The resulting overlapping PCR products contain 15 bp of homology with each other. The PCR fragments corresponding to each internal region were then purified and I-CreI coding sequences containing the mutations F54L, V105A and I132V were generated by PCR assembly. The PCR products are subsequently cloned in pcDNA6.2 from INVITROGEN (pCLS1768, FIG. 29), a vector for expression in CHO cells, using the Gateway protocol (INVITROGEN). Resulting clones were verified by sequencing (MILLEGEN).

[0917] c) Extrachromosomal Assay in Mammalian Cells

[0918] Extrachromosomal assay in mammalian cells was performed as described in Example 30.

[0919] 2) Results

[0920] All possible combinations of three site directed mutations (F54L, V105A and I132V) were inserted into a HBV3.3 variant, HBV3.3_F1 (I-CreI 26R,33C,38S,44N,68Y,70S,75R,77Y,81T,139R, SEQ ID NO: 791) and an HBV3.4 variant, HBV3.4_A7 (I-CreI 19S,33C,38Y,44K,68Y,70S,75N,77Q,140M, SEQ ID NO: 782). Thus, seven site-directed variants were generated for each variant (+54L, +54L 105A, +54L 132V, +105A, +105A 132V, +132V, +54L 105A 132V) and were cloned in the pCLS1768 vector allowing expression of the variant in CHO cells (FIG. 29).

[0921] All pair-wise combinations of the HBV3.3 and HBV3.4 variants containing site-directed mutations were screened using the extrachromosomal assay in CHO cells. The screen is carried out by co-transfection of 3 plasmids in CHO cells: one expressing a variant cleaving HBV3.3, a second expressing a variant cleaving HBV3.4 and a third one containing the HBV3 target cloned in pCLS1058 (FIG. 11).

[0922] Five different heterodimers were found to trigger improved cleavage of the HBV3 target in a primary screen in CHO cells. These heterodimers consisted of a HBV3.3 variant containing site-directed mutations co-expressed with either the initial HBV3.4 variant or one of four HBV3.4 variants containing site-directed mutations (Table LXXIV). These five heterodimers were validated in a secondary screen (FIG. 79). In the secondary screen, the efficiency of the five heterodimers was compared to the initial heterodimer (HBV3.3_F1 variant I-CreI 26R,33C,38S,44N,68Y,70S,75R,77Y,81T,139R, SEQ ID NO: 791 co-expressed with the HBV3.4 A7 variant I-CreI 19S,33C,38Y,44K,68Y,70S,75N,77Q,140M, SEQ ID NO: 782). All five optimized heterodimers were able to cleave the HBV3 target with an efficacy superior to that observed with the initial heterodimer.

TABLE LXXIV
I-CreI variant combinations displaying improved cleavage efficiency
of the HBV3 target in CHO cells.

| Optimized | | |
|---|---|---|
| variant | Optimized variant derived from variants | |
| cleaving | cleaving | SEQ ID |
| HBV3.3 | the HBV3.4 target | NO: |
| 3.3_R5 | 3.4_A7: 19S 33C 38Y 44K 68Y 70S 75N | 794 |
| 26R 33C 38S | 77Q 140M | |
| 44N 68Y 70S | 3.4_R2: 19S 33C 38Y 44K 54L 68Y 70S 75N | 795 |
| 75R 77Y 81T | 77Q 105A 140M | |
| 105A 132V | 3.4_R4: 19S 33C 38Y 44K 68Y 70S 75N | 796 |
| 139R | 77Q 105A 140M | |
| (SEQ ID NO: | 3.4_R5: 19S 33C 38Y 44K 68Y 70S 75N | 797 |
| 793) | 77Q 105A 132V 140M | |
| | 3.4_R6: 19S 33C 38Y 44K 68Y 70S 75N | 798 |
| | 77Q 132V 140M | |

* Mutations resulting from site-directed mutagenesis are in bold.

### EXAMPLE 33

### Single-Chain

[0923] The optimized HBV3 heterodimer obtained by co-expression of the two variants HBV3.3_R5 and HBV3.4_R4 efficiently cleaves the HBV3 target but will also cleave the HBV3.3 and HBV3.4 targets because of the presence of the two homodimers. To avoid this unwanted cleavage activity, a single chain molecule composed of the two I-CreI derived variants 3.3_R5 and 3.4_R4 was generated. The single chain construct was engineered using the linker RM2 (AAGGSDKYNQALSKYNQALSKYNQALSGGGGS), resulting in the production of the single chain molecule 3.3_R5-RM2-3.4_R4, also called SC_{—}34. In a second step, mutations K7E, K96E were introduced into the 3.3_R5 variant and mutations E8K, E61R into the 3.4_R4 variant of 3.3_R5-RM2-3.4_R4 to create the single chain molecule: 3.3R5(K7E K96E)-RM2-3.4_R4(E8K E61R) that is also called SC_OH_{—}34. The resulting single chain constructs were then tested in an extrachromosomal assay in CHO for their ability to cleave the HBV3 target.

[0924] 1) Materials and Methods

[0925] a) Cloning of the Single Chain Molecules

[0926] The two single chain molecules 3.3_R5-RM2-3.4_R4 (SEQ ID NO: 799) and 3.3_R5(K7E K96E)-RM2-3.4_R4(E8K E61R) (SEQ ID NO: 800) were synthesized by MWG and cloned into pCLS1768 (FIG. 29).

[0927] b) Extrachromosomal Assay in Mammalian Cells

[0928] Extrachromosomal assay in mammalian cells was performed as described in Example 30.

[0929] 2) Results

[0930] The activity of the two HBV3 single chain molecules SC_{—}34 and SC_OH_{—}34 was monitored against the HBV3 target using the previously described extrachromosomal assay in CHO cells. The ability of these single-chain molecules to cleave the HBV3 target was compared to the heterodimeric meganuclease (3.3_R5/3.4_R4) as well as the I-SceI meganuclease against its proper target (tagggataacagggtaat: SEQ ID NO: 718).

[0931] The results of this screen (FIG. 80), indicate that both single chain molecules, SC_{—}34 and SC_OH_{—}34, display a cleavage activity for the HBV3 target that is similar if not greater that the heterodimeric meganuclease (3.3_R5/3.4_R4). In addition the cleavage activity, observed with the single-chain molecule is as active as I-SceI against its proper target. These results demonstrate that it is possible to improve the specificity of the HBV3 meganuclease by generating a single-chain molecule without affecting its activity toward the DNA target of interest.

### EXAMPLE 34

### Covalent Assembly of Single Chain Molecules and Validation of HBV12 Target Cleavage in an Extrachromosomal Model in CHO Cells

[0932] I-CreI variants able to efficiently cleave the HBV12 target in yeast when forming heterodimers were described in Examples 13, 14 and 15. Co-expression of two variants to obtain heterodimers that cleave the HBV12 target will also result in the generation of homodimers that can cleave the HBV12.3 and HBV12.4 targets. To avoid this unwanted cleavage activity, several of these variants, shown in Table LXXV, were selected for covalent assembly as single-chain molecules.

TABLE LXXV
I-CreI variants efficiently cleaving HBV12.3 or HBV12.4 target sequences

| | | Seq. |
|---|---|---|
| HBV12 | Amino acids positions and residues of | ID |
| variant | the I-CreI variants | NO |
| HBV12.3-MA | 24F 32Q 38C 44D 68Y 70S 75S 77R 80K | 667 |
| HBV12.3-MB | 24F 32Q 38C 44D 68Y 70S 75S 77R 80K 132V | 669 |
| HBV12.3-MC | 30S 32R 33S 44D 68Y 70S 75S 77R | 621 |
| HBV12.4-M1 | 32H 33C 40R 44R 68Y 70S 75N 77Q | 672 |

[0933] Single chain constructs were engineered using the linker RM2 (AAGGSDKYNQALSKYNQALSKYNQALSGGGGS), thus resulting in the production of the single chain molecules MA-linker RM2-M1, MB-linker RM2-M1 and MC-linker RM2-M1. During this design step, the G19S mutation was introduced in the C-terminal variant, M1. In addition, mutations K7E, K96E were introduced into the MA, MB and MC variants and mutations E8K, E61R into the M1 variant to create the single chain molecules: MA (K7E K96E)-linkerRM2-M1 (E8K E61R G19S), MB (K7E K96E)-linkerRM2-M1 (E8K E61R G91S) and MC (K7E K96E)-linkerRM2-M1 (E8K E61R G19S) that are referred to as the SCOH-HBV12-B1, SCOH-HBV12-B2 and SCOH-HBV12-B3 scaffolds, respectively (Table LXXVI).

TABLE LXXVI
Single Chain I-Cre I variants for HBV12 cleavage in CHO cells.

| | | Mutations | Mutations | |
|---|---|---|---|---|
| | | on N- | on C- | |
| | | terminal | terminal | |
| Construct | Single chain | segment | segment | SEQ ID NO |
| pCLS2862 | SCOH- | 7E 24F 32Q | 8K 19S 32H | 788 |
| | HBV12-B1 | 38C 44D 68Y | 33C 40R 44R | |
| | | 70S 75S 77R | 61R 68Y 70S | |
| | | 80K 96E | 75N 77Q | |
| pCLS2865 | SCOH- | 7E 24F 32Q | 8K 19S 32H | 804 |
| | HBV12-B2 | 38C 44D 68Y | 33C 40R 44R | |
| | | 70S 75S 77R | 61R 68Y 70S | |
| | | 80K 96E | 75N 77Q | |
| | | 132V | | |
| pCLS2868 | SCOH- | 7E 30S 32R | 8K 19S 32H | 805 |
| | HBV12-B3 | 33S 44D 68Y | 33C 40R 44R | |
| | | 70S 75S 77R | 61R 68Y 70S | |
| | | 96E | 75N 77Q | |

[0934] In order to identify single-chain molecules displaying maximal cleavage activity for the HBV12 target in CHO cells, the efficiency of single chain constructs to cleave the HBV12 target was compared, using an extrachromosomal assay in CHO cells. The screen in CHO cells is a single-strand annealing (SSA) based assay where cleavage of the target by the meganucleases induces homologous recombination and expression of a LagoZ reporter gene (a derivative of the bacterial lacZ gene).

### 1) Materials and Methods

### a) Cloning of the Single Chain Molecule

[0935] A series of synthetic genes was ordered from MWG-EUROFINS. Synthetic genes coding for the different single chain variants targeting HBV12 were cloned into pCLS1853 (FIG. 14) using AscI and XhoI restriction sites.

### b) Cloning of HBV 12 Target in a Vector for CHO Screen

[0936] The target was cloned as follow: an oligonucleotide corresponding to the HBV12 target sequence flanked by gateway cloning sequence was ordered from PROLIGO: 5′ tggcatacaagtttatattcttgggaacaagagctacacaatcgtctgtca 3′ (SEQ ID NO: 633). Double-stranded target DNA, generated by PCR amplification of the single stranded oligonucleotide, was cloned using the Gateway protocol (INVITROGEN) into CHO reporter vector (pCLS1058, FIG. 11). Cloned target was verified by sequencing (MILLEGEN).

### c) Extrachromosomal Assay in Mammalian Cells

[0937] CHO cells were transfected with Polyfect® transfection reagent according to the supplier's protocol (QIAGEN). 72 hours after transfection, culture medium was removed and 150 μl of lysis/revelation buffer for β-galactosidase liquid assay was added. After incubation at 37° C., OD was measured at 420 nm. The entire process is performed on an automated Velocity11 BioCel platform. Per assay, 150 ng of target vector was cotransfected with an increasing quantity of I-CreI variant DNA ranging from 0.78 to 25 ng. The total amount of transfected DNA was completed to 175 ng (target DNA, variant DNA, carrier DNA) using an empty vector, pCLS0002 (FIG. 85).

### 2) Results

[0938] The activity of the three HBV12 single chain molecules SCOH-HBV12-B1, SCOH-HBV12-B2 and SCOH-HBV12-B3 was monitored against the HBV12 target using the previously described CHO assay in comparison to our internal controls, SCOH-RAG and the I-SceI meganuclease against their proper targets (Rag: ttgttctcaggtacctcagccaga SEQ ID NO: 806 and I-SceI: tagggataacagggtaat: SEQ ID NO: 718). All comparisons were done at 0.78 ng, 1.56 ng, 3.12 ng, 6.25 ng, 12.5 ng and 25 ng of transfected variant DNA.

[0939] The results of this screen (FIG. 86) indicate that all three single chain molecules, SCOH-HBV12-B1, SCOH-HBV12-B2 and SCOH-HBV12-B3, display a cleavage activity for the HBV12 target that is significantly greater than I-SceI and similar to SCOH-RAG against their proper targets. High levels of cleavage activity for the HBV12 single-chain molecules were observed even at the lowest doses (0.78 ng). These results demonstrate that it is possible to improve the specificity of the HBV12 meganuclease by generating a single-chain molecule without affecting its activity toward the DNA target of interest.

### EXAMPLE 35

### Validation of HBV12 Target Cleavage in an Extrachromosomal Model in HepG2 Cells

[0940] Single-chain I-CreI variants able to efficiently cleave the HBV12 target sequence in CHO cells were described in Example 34. In order to further validate these single chain molecules, they were examined for their ability to cleave an extrachromosomal plasmid substrate in a hepatocyte derived cell line, HepG2. The screen in HepG2 cells utilizes a plasmid containing an HBV12 target site inserted between the CMV promoter and a LacZ reporter gene where cleavage of the target by a meganuclease can result in the inactivation of the LacZ gene. HepG2 cells are transfected with plasmids coding for HBV12 single-chain molecules and either a LacZ expression plasmid containing the HBV12 target site or the LacZ plasmid without the target site. The activity of the HBV12 single-chain molecules is then evaluated by the reduction in LacZ activity observed in cells transfected with the target substrate compared to cells transfected with a plasmid without the target.

### 1) Material and Methods

### a) Cloning of HBV12 Target in a Vector for HepG2 Screen

[0941] The target was cloned as follows: a pair of complementary oligonucleotides corresponding to the HBV12 target or the I-SceI target flanked by sequences compatible with an NheI restriction site were ordered from Eurogentec (HBV12-For 5′ ctagctgtagctcttgttcccaagaatattg3′, SEQ ID NO: 807; HBV12-Rev 5′ ctagcatattcttgggaacaagagctacag3′, SEQ ID NO: 808; SCEI-For 5′ ctagcacgctagggataacagggtaatatg3′, SEQ ID NO: 809; SCEI-Rev 5′ ctagcatattaccctgttatccctagcgtg3′, SEQ ID NO: 810). Double-stranded target DNA, generated by annealing of the single stranded oligonucleotides, was cloned into the unique NheI site located between the CMV promoter and the LacZ reporter gene in the plasmid pCLS3469 (FIG. 87). Cloned target was verified by sequencing (MILLEGEN).

### b) Extrachromosomal Assay in HepG2 Cells

[0942] HepG2 cells were cultured in EMEM supplemented with 2mM L-glutamine, penicillin (100 IU/ml), streptomycin (100 mg/ml), amphotericin B (Fongizone: 0.25 mg/ml, Invitrogen-Life Science) and 10% FBS. 10 cm plates were seeded with 7.5×10⁵ cells per plate. The next day HepG2 cells were transfected using LipoD293 (Gentaur) with either 3 μg, 7 μg or 11 μg of the I-CreI variants cleaving HBV12 target sequences or 3 μg of plasmid expressing 1-SceI and 0.1 μg of LacZ plasmid substrate, the total amount of DNA was completed to 11 μg with empty vector pCLS0003 (FIG. 85). The transfection efficiency was between 30-40% using this method. Cells were harvested four days after transfection and β-galactosidase activity was assayed on a total of 5×10⁴ cells using a luminescent β-galactosidase assay (Beta-Glo assay, Promega).

### 2) Results

[0943] Three single chain variants cleaving the HBV12 target sequence (SCOH-HBV12-B1, SCOH-HBV12-B2 and SCOH-HBV12-133) described in Example 34, were tested for their ability to inactivate a LacZ episomal substrate. As a positive control I-SceI was tested against a plasmid containing an I-SceI site inserted between the CMV promoter and the LacZ gene. FIG. 88 shows the results obtained for the three single-chain variants as well as I-SceI after transfection with either a LacZ expression plasmid containing the relevant target site or a LacZ plasmid without the target site.

[0944] All three SCOH-HBV12 variants display a significant decrease in LacZ activity when transfected with a LacZ substrate containing a HBV12 target site compared to the control transfection with a LacZ plasmid without the target site. The SCOH-HBV12-B3 variant displays a decrease of between 30-50% depending on the quantity of expression plasmid transfected. SCOH-HBV12-B1 and SCOH-HBV12-B2 display the strongest activity resulting in a decrease of between 64-75% depending on the quantity of expression plasmid transfected. This level of reduction is similar to that observed with the I-SceI control, a reduction of 89% with 3 μg of expression plasmid. Thus, these results indicate that the single chain variants cleaving the HBV12 target sequence are capable of efficiently cleaving an extrachromosmal substrate and inactivating LacZ expression in the hepatocyte cell line HepG2.

### EXAMPLE 36

### Hepatocyte-Specific SCOH-HBV12-B1 Expression

[0945] Hepatocytes are the only confirmed site of HBV replication. We thus decided to restrict SCOH-HBV12-B1 expression to these cells. To identify the best suitable combination of liver-specific promoter and enhancer elements allowing a high level of SCOH-HBV12-B1 expression in hepatocytes while inducing no expression in others cell types, we constructed nine liver-specific SCOH-HBV12-B1 expression cassettes that we tested in HepG2 cells and 29314 cells.

### 1) Materials and Methods

[0946] a) Construction of the Hepatocyte-Specific SCOH-HBV12-B1 Expression Cassettes Construction of pCLS4695

[0947] The SCOH-HBV12-B1 sequence (SEQ ID NO: 788) was PCR amplified and cloned as a XmaI and XbaI fragment into the pCLS002 (FIG. 89) giving rise to construct 1A (FIG. 90).

[0948] The human α1-antitrypsin (hAAT) promoter sequence (SEQ ID NO: 811) was synthesized by MWG and cloned as a SacI fragment into the construct 1A (FIG. 90) giving rise to construct 2A (FIG. 91),The bovine growth hormone polyadenylation signal (bpA) sequence (SEQ ID NO: 812) was synthesized by MWG and cloned as a SalI fragment into the construct 2A (FIG. 91) giving rise to pCLS4695 (FIG. 92).

### Construction of ACLS 4696

[0949] The hepatic locus control region from the apoliproprotein E gene (ApoE-HCR) sequence (SEQ ID NO: 813) was synthesized by MWG and cloned as a EcoRI fragment into the pCLS4695 (FIG. 92) giving rise to pCLS4696 (FIG. 93).

Construction of pCLS 4693

[0950] A 1.4 kb truncated factor IX first intron sequence (SEQ ID NO: 814) was synthesized by MWG and cloned as a Pad fragment into the pCLS4695 (FIG. 92) giving rise to pCLS4693 (FIG. 94).

[0951] Construction of pCLS 4694

[0952] A 1.4 kb truncated factor IX first intron sequence (SEQ ID NO: 814) was synthesized by MWG and cloned as a PacI fragment into the pCLS4696 (FIG. 93) giving rise to pCLS4694 (FIG. 95).

Construction of pCLS 4492

[0953] The SCOH-HBV12-B1 sequence (SEQ ID NO: 788) was PCR amplified and cloned as a XmaI and XbaI fragment into the pCLS002 (FIG. 89) giving rise to construct 1B (FIG. 96).

[0954] The human α1-antitrypsin (hAAT) promoter sequence (SEQ ID NO: 811) was synthesized by MWG and cloned as a SacI fragment into the construct 1B (FIG. 96) giving rise to construct 2B (FIG. 97).The bovine growth hormone polyadenylation signal (bpA) sequence (SEQ ID NO: 812) was synthesized by MWG and cloned as a SalI fragment into the construct 2B (FIG. 97) giving rise to pCLS4492 (FIG. 98).

Construction of pCLS4513

[0955] The hepatic locus control region from the apoliproprotein E gene (ApoE-HCR) sequence (SEQ ID NO: 813) was synthesized by MWG and cloned as a EcoRI fragment into the pCLS4492 (FIG. 98) giving rise to pCLS4513 (FIG. 99).

Construction of pCLS4604

[0956] A 1.4 kb truncated factor IX first intron sequence (SEQ ID NO: 814) was synthesized by MWG and cloned as a Pad fragment into the pCLS4492 (FIG. 98) giving rise to pCLS4604 (FIG. 100).

Construction of pCLS4605

[0957] A 1.4 kb truncated factor IX first intron sequence (SEQ ID NO: 814) was synthesized by MWG and cloned as a Pad fragment into the pCLS4513 (FIG. 99) giving rise to pCLS4605 (FIG. 101).

Construction of pCLS4863

[0958] The hepatic locus control region from the apoliproprotein E gene (ApoE-HCR) sequence (SEQ ID NO: 813) was synthesized by MWG and cloned as an EcoRI fragment into pCLS4492 (FIG. 98) giving rise to pCLS4863 (FIG. 102).

### b) Culture and Transfection of HepG2 Cells

[0959] HepG2 cells were cultured in EMEM supplemented with 2 mM L-glutamine, penicillin (100 IU/ml), streptomycin (100 mg/ml), amphotericin B (Fongizone: 0.25 mg/ml, Invitrogen-Life Science) and 10% FBS. 10 cm plates were seeded with 7.5×10⁵ cells per plate. The next day HepG2 cells were transfected using LipoD293 (Gentaur) with either 1 μg or 5 μg of plasmid expressing SCOH-HBV12-B1 under the control of hepatocyte specific promoters or under the control of the CMV promoter. The total amount of transfected DNA was completed to 5 μg using an empty vector, pCLS0003 (FIG. 85). The transfection efficiency was between 30-35% using this method.

### c) Culture and Transfection of 293H Cells

[0960] 293H cells were cultured in DMEM supplemented with 2 mM L-glutamine, penicillin (100 IU/ml), streptomycin (100 mg/ml), amphotericin B (Fongizone: 0.25 mg/ml, Invitrogen-Life Science) and 10% FBS. 10 cm plates were seeded with 1×10⁶ cells per plate. The next day 2931-1 cells were transfected using Lipofectamine-2000 (Invitrogen) with either 1 pig or 5 mg of plasmid expressing SCOH-HBV12-B1 under the control of hepatocyte specific promoters or under the control of the CMV promoter. The total amount of transfected DNA was completed to 5 μg using an empty vector, pCLS0003 (FIG. 85). The transfection efficiency was between 80-85% using this method.

### d) Expression Analysis in HepG2 and 2931-1 Cells

[0961] Transfected cells were harvested two days after transfection and lysed in RIPA lysis buffer (Santa Cruz) supplemented with PMSF (Santa Cruz Biotechnology), sodium orthovanadate (Santa Cruz Biotechnology) and antiprotease (Santa Cruz Biotechnology). Proteins were quantified using a Bio-Rad protein assay (Bio-Rad). Forty micrograms of proteins were electrophoresed and Western blotted with a polyclonal rabbit anti-IcreI followed by HRP conjugated goat anti rabbit IgG. Labeled antibodies were detected using an enhanced chemoluminescence kit (Santa Cruz Biotechnology). Signals were quantified using image J (National Institutes of Health, Bethesda, Md.).

### 2) Results

[0962] The nine expression cassettes were evaluated for their ability to induce SCOH-HBV12-B1 expression in HepG2 cells. As a positive control the plasmid pCLS2862 in which the SCOH-HBV12-B1 expression is under the control of the cytomegalovirus (CMV) promoter was used. FIG. 103 shows that plasmids containing either the hAAT promoter and the bpA (pCLS4695 and pCLS4492), or the hAAT promoter, the bpA and the truncated factor IX first intron (pCLS4693 and pCLS4604), induce an expression of SCOH-HBV12-B1 that is almost undetectable (FIG. 103). Plasmids containing either the ApoE-HCR, the hAAT promoter, and the bpA (pCLS4696 and pCLS4513), or the ApoE-HCR, the hAAT promoter, the truncated factor IX first intron and the bpA (pCLS4694 and pCLS4605) induce an expression of SCOH-HBV12-B1 that is slightly weaker than that observed with the CMV control plasmid pCLS2862 (FIG. 103). The plasmid pCLS4863 containing two ApoE-HCRs, the hAAT promoter and the bpA induces an expression of SCOH-HBV12-B1 that is as high as the control plasmid pCLS2862 (FIG. 103).

[0963] To determine if these promoters were hepatocyte specific, the nine expression cassettes were evaluated for their ability to induce SCOH-HBV12-B1 expression in 293H cells, an embryonic human kidney cell line. As a positive control the plasmid pCLS2862 in which the SCOH-HBV12-B1 expression is under the control of the CMV promoter was used. As seen in FIG. 105, none of the hepatocyte specific promoters tested induce the expression of SCOH-HBV12-B1 in 293H cells. In contrast, the CMV promoter construction results in a strong expression of SCOH-HBV12-B1 in these cells (FIG. 104).

[0964] These results indicate that the best suitable combination of known liver-specific promoter and enhancer elements for the expression of SCOH-HBV12-B1 in hepatocytes corresponds to the cassette containing two ApoE-HCRs, a hAAT promoter and a bpA. This cassette induces a strong expression of SCOH-HBV12-B1 in HepG2 cells and no expression in 293H cells. Thus this cassette fulfils the requirements of a liver-specific expression cassette.

### EXAMPLE 37

### Validation of Cleavage Activity of Hepatocyte-Specific SCOH-HBV12-B1 Expression Constructs

[0965] Expression plasmids able to induce hepatocyte-specific expression of SCOH-HBV12-B1 were described in Example 36. To further validate these expression plasmids, they were examined for their ability to cleave an extrachromosomal plasmid substrate in a hepatocyte derived cell line, HepG2. The screen in HepG2 cells utilizes a plasmid containing an HBV12 target site inserted between the CMV promoter and a LacZ reporter gene where cleavage of the target by a meganuclease can result in the inactivation of the LacZ gene. HepG2 cells are transfected with one of the HBV12 single-chain expression plasmids described in Example 36 and either a LacZ expression plasmid containing the HBV12 target site or the LacZ plasmid without the target site. The cleavage activity is then evaluated by the reduction in LacZ activity observed in cells transfected with the target substrate compared to cells transfected with a plasmid without the target.

### 1) Material and Methods

### a) Hepatocyte Specific SCOH-HBV12-B1 Expression Plasmids

### See Example 36.

### b) Extrachromosomal Assay in HepG2 Cells

### See Example 35.

### 2) Results

[0966] The nine hepatocyte-specific SCOH-HBV12-B1 expression plasmids described in Example 36, were tested for their ability to inactivate a LacZ episomal substrate in HepG2 cells. pCLS 2862 in which SCOH-HBV12-B1 expression is under the control of the CMV promoter, and pCLS 003 that does not code for SCOH-HBV12-B1 were used as a positive and negative controls, respectively. The results presented in FIG. 105 indicate that transfection with either the plasmids containing the hAAT promoter and bpA (pCLS4695 and pCLS4492), or the plasmids containing the hAAT promoter, the bpA and the truncated factor IX first intron (pCLS4693 and pCLS4604), results in a decrease of LacZ activity of between 27% and 43%. The SCOH-HBV12-B1 expression plasmids containing the ApoE-HCR, the hAAT promoter, and the bpA (pCLS4696 and pCLS4513), or the plasmids containing the ApoE-HCR, the hAAT promoter, the truncated factor IX first intron and the bpA (pCLS4694 and pCLS4605), display a decrease of between 52% and 64% (FIG. 105). pCLS4863 containing two ApoE-HCRs, the hAAT promoter and the bpA results in the largest reduction, a 78% decrease of LacZ activity (FIG. 105). These results indicate that the level of cleavage activity observed with the nine hepatocyte-specific SCOH-HBV12-B1 expression plasmids correlates with their expression level (see Example 36, FIG. 104). Thus, the best suitable combination of known liver-specific promoter and enhancer elements for SCOH-HBV12-B1 in terms of expression and cleavage activity corresponds to the cassette containing two ApoE-HCRs, a hAAT promoter and a bpA.

The application's sequence listing, which the Patent Office published only in electronic form, follows.

SEQUENCE LISTING (814 sequences)

SEQ ID NO: 1 - protein, 163 aa, Chlamydomonas reinhardtii
MNTKYNKEFLLYLAGFVDGDGSIIAQIKPNQSYKFKHQLSLTFQVTQKTQRRWFLDKLVDEIGVGYVRDRGSVSDYILSEIKPLHNFLTQLQPFLKLKQKQANLVLKIIERLPSAKESPDKFLEVCTWVDQIAALNDSKTRKTTSETVRAVLDSLSEKKKSSP

SEQ ID NO: 2 - DNA, 24 bp, Artificial
  C1221 target
tcaaaacgtcgtacgacgttttga

SEQ ID NO: 3 - protein, 167 aa, Artificial
  I-CreI  N75
MANTKYNKEFLLYLAGFVDGDGSIIAQIKPNQSYKFKHQLSLTFQVTQKTQRRWFLDKLVDEIGVGYVRDRGSVSDYILSEIKPLHNFLTQLQPFLKLKQKQANLVLKIIEQLPSAKESPDKFLEVCTWVDQIAALNDSKTRKTTSETVRAVLDSLSEKKKSSPAAD

SEQ ID NO: 4 - DNA, 24 bp, Artificial
  10AAA_P
tcaaaacgtcgacggacgttttga

SEQ ID NO: 5 - DNA, 24 bp, Artificial
  10AGG_P
tcaggacgtcgtacgacgttttga

SEQ ID NO: 6 - DNA, 24 bp, Artificial
  5CAC_P
tcaaaaccacgtacgtggttttga

SEQ ID NO: 7 - DNA, 24 bp, Artificial
  5GCC_P
tcaaaacgccgtacggcgttttga

SEQ ID NO: 8 - DNA, 24 bp, Artificial
  HSV_2.1
ataaactcacacacggcgtcctcg

SEQ ID NO: 9 - DNA, 24 bp, Artificial
  HSV_2.2
ataaactcacgtacggcgtcctcg

SEQ ID NO: 10 - DNA, 24 bp, Artificial
  HSV_2.3
ataaactcacacacgtgagtttat

SEQ ID NO: 11 - DNA, 24 bp, Artificial
  HSV_2.4
ccaggacgccgtacggcgtcctgg

SEQ ID NO: 12 - DNA, 24 bp, Artificial
  HSV_2.5
ataaactcacacacgtgagtttat

SEQ ID NO: 13 - DNA, 24 bp, Artificial
  HSV_2.6
ccaggacgccacacggcgtcctgg

SEQ ID NO: 14 - DNA, 24 bp, Artificial
  10AAG_P
tcaagacgtcgtacgacgtcttga

SEQ ID NO: 15 - DNA, 24 bp, Artificial
  10ACT_P
tcactacgtcgtacgacgtagtga

SEQ ID NO: 16 - DNA, 24 bp, Artificial
  5CAG_P
tcaaaaccaggtacctggttttga

SEQ ID NO: 17 - DNA, 24 bp, Artificial
  HSV_4
ccaagctggtgtacctgatagtgg

SEQ ID NO: 18 - DNA, 24 bp, Artificial
  HSV_4.3
ccaagctggtgtacaccagcttgg

SEQ ID NO: 19 - DNA, 24 bp, Artificial
  HSV_4.4
ccactatcaggtacctgatagtgg

SEQ ID NO: 20 - skipped

SEQ ID NO: 21 - DNA, 24 bp, Artificial
  HSV_13
atgttccccgtctccatgtccagg

SEQ ID NO: 22 - DNA, 24 bp, Artificial
  HSV_14
ctcttcttcgtcttcgggggtcgc

SEQ ID NO: 23 - DNA, 24 bp, Artificial
  HSV_1
atgggacgtcgtaagggggcctgg

SEQ ID NO: 24 - DNA, 24 bp, Artificial
  HSV_2
ataaactcacacacggcgtcctgg

SEQ ID NO: 25 - protein, 167 aa, Artificial
  HSV12.3-M1
MANTKYNKEFLLYLAGFVDGDGSIVAQIKPNQSCKFKHSLSLTFIVTQKTRRRWFLDKLVDEIGVGYVRDSGSVSNYRLSEIKPLHNFLTQLQPFLKLKQKQANLVLKIIEQLPSAKESPDKFLEVCTWVDQVAALNDSKTRKTTSETVRAVLDSLSEKKKSSPAAD

SEQ ID NO: 26 - protein, 167 aa, Artificial
  HSV12.4-ME-132V
MANTKYNKEFLLYLAGFVDSDGSIIAQIKPRQSSKFKHQLSLTFKVTQKTQRRWFLDKLVDEIGVGHVYDSGSVSDYTLSEIKPLHNILTQLQPFLKLKQKQANLVLKIIEQLPSAKESPDKFLEVCTWVDQVAALNDSRTRKTTSETVRAVLDSLSEKKKSSSAAD

SEQ ID NO: 27 - protein, 167 aa, Artificial
  HSV12.3-M1-80K
MANTKYNKEFLLYLAGFVDGDGSIVAQIKPNQSCKFKHSLSLTFIVTQKTRRRWFLDKLVDEIGVGYVRDSGSVSNYRLSKIKPLHNFLTQLQPFLKLKQKQANLVLKIIEQLPSAKESPDKFLEVCTWVDQVAALNDSKTRKTTSETVRAVLDSLSEKKKSSPAAD

SEQ ID NO: 28 - protein, 167 aa, Artificial
  HSV13-3-M15-19S
MANTKYSKEFLLYLAGFVDSDGSIIAQIEPNQSRKFKHRLKLTLNVTQKTQRRWFLDKLVDEIGVGYVHDSGSVSYYNLGKIKPLHNFLTQLQPFLKLKQKQANLVLKIIEQLPSAKESPDKFLEVCTWVDQIAALNDSKTRKTTSETVRAVLDSLSEKKKSSPAAD

SEQ ID NO: 29 - protein, 167 aa, Artificial
  HSV13-4-MD
MANTKYNKEFLLYLAGFVDGDGSIIAQIKPRQSYKFKHQLSLTFRVTQKTQRRWFLDKLVEEIGVGYVYDSGSVSNYDLSGIKPLHNFLTQLQPFLKLKQKQANLVLKIIEQLPSAKESPDKFLEVCTWVDQIAALNDSKTRKTTSETVRAVLDSLSEKKKSSPAAD

SEQ ID NO: 30 - protein, 167 aa, Artificial
  HSV13-3-M16-19S
MANTKYSKEFLLYLAGFVDSDGSIIAQIEPNQSRKFKHRLKLTFNVTQKTQRRWFLDKLVDEIGVGYVHDSGSVSYYNLGKIKPLHNFLTQLQPFLKLKQKQANLALKIIEQLPSAKESPDKFLEVCTWVDQIAALNDSKTRKTTSETVRAVLDSLSEKKKSSPAAD

SEQ ID NO: 31 - protein, 167 aa, Artificial
  HSV14.3-MA-19S
MANTKYNKEFLLYLAGFVDSDGSIIAQIKPNQSGKFKHCLSLTFKVTQKTQRRWFLDKLVDEIGVGHVYDSGSVSDYTLSEIKPLHNFLTQLQPFLKLKQKQANLVLKIIEQLPSAKESPDKFLEVCTWVDQIAALNDSKTRKTTSETVRAVLDSLSEKKKSSPAAD

SEQ ID NO: 32 - protein, 167 aa, Artificial
  HSV14.4 -MB
MANTKYNKEFLLYLAGFVDGDGSIIAQIKPNQSHKFKHQLRLTLKVTQKTQRRWILDKLVDEIGVGYVADSGSVSDYILSEIKPLHNFLTQLQPFLKLKQKQANLVLKIIEQLPSVKESPDKFLEVCTWADQIAALNDSKTRKTTSETVRAVLDSLSEKKKSSPAAD

SEQ ID NO: 33 - protein, 167 aa, Artificial
  HSV2.3-M1
MANTKYNKEFLLYLAGFVDGDGSIIAQIKPNQSYKFKHQLSLTFDVTQKTQRRWFLDKLVDEIGVGYVTDSGSVSRYRLSKIKPLHNFLTQLQPFLKLKQKQANLVLKIIEQLPSAKESPDKFLEVCTWVDQIAALNDSKTRKTTSETVRAVLDSLSEKKKSSPAAD

SEQ ID NO: 34 - protein, 167 aa, Artificial
  HSV2.4-MC
MANTKYNKEFLLYLAGFVDGDGSIIAQIEPNQSYKFKHRLKLTFKVTQKTQRRWILDKLVDEIGVGYVRDSGSVSNYILSEIKPLHNFLTQLQPFLKLKQKQANLVLKIIEQLPSAKESPDKFLEVCTWVDQIAALNDSKTRKTTSETVRAVLDSLSEKKKSSPAAD

SEQ ID NO: 35 - protein, 167 aa, Artificial
  HSV4.3 optimised variant
MANTKYNKEFLLYLAGFVDGDGSIIAQIKPNQSYKFKHQLSLTFMVTQKTQRRWFLDKLVDEIGVGYVRDAGSVSDYILSKIKPLHNFLTQLQPFLKLKQKQANLVLKIIEQLPSAKESPDKFLEVCTWVDQVAALNDSKTRKTTSKTVRAVLDSLGEKKKSSPAAD

SEQ ID NO: 36 - protein, 167 aa, Artificial
  HSV4.4 optimised variant
MANTKYNKEFLLYLAGFVDGDGSIIAQIKPNQDYKFKHYLSLTFAVTQKTQRRWFLDKLVDEIGVGYVYGSGSVSYYKLSAIKPLHNFLTQLQPFLKLKQKQANLALKIIEQLPSAKESPDKFLEVCTWVDQIAALNDSKTRKTTSETVRAVLDSLSEKKKSPPAAD

SEQ ID NO: 37 - DNA, 24 bp, Artificial
  5GGT_P
tcaaaacggtgtacaccgttttga

SEQ ID NO: 38 - DNA, 51 bp, Artificial
  HSV2.3 OLIGO
tggcatacaagtttataaactcacgtacgtgagtttatcaatcgtctgtca

SEQ ID NO: 39 - DNA, 51 bp, Artificial
  HSV2.5 OLIGO
tggcatacaagtttataaactcacacacgtgagtttatcaatcgtctgtca

SEQ ID NO: 40 - protein, 167 aa, Artificial
  Table VIII variant 1
MANTKYNKEFLLYLAGFVDGDGSIIAQIKPNQSYKFKHQLSLTFNVTQKTQRRWFLDKLVDEIGVGYVRDSGSVSRYYLSEIKPLHNFLTQLQPFLKLKQKQANLVLKIIEQLPSAKESPDKFLEVCTWVDQIAALNDSKTRKTTSETVRAVLDSLSEKKKSSPAAD

SEQ ID NO: 41 - protein, 167 aa, Artificial
  Table VIII variant 2
MANTKYNKEFLLYLAGFVDGDGSIIAQIKPNQSYKFKHQLSLTFNVTQKTQRRWFLDKLVDEIGVGYVEDSGSVSRYKLSEIKPLHNFLTQLQPFLKLKQKQANLVLKIIEQLPSAKESPDKFLEVCTWVDQIAALNDSKTRKTTSETVRAVLDSLSEKKKSSPAAD

SEQ ID NO: 42 - protein, 167 aa, Artificial; identical to SEQ ID NO: 41
  TableVIII variant 3

SEQ ID NO: 43 - protein, 167 aa, Artificial
  Table VIII variant 4
MANTKYNKEFLLYLAGFVDGDGSIIAQIKPNQSYKFKHQLSLTFKVTQKTQRRWFLDKLVDEIGVGYVQDRGSVSDYILSEIKPLHNFLTQLQPFLKLKQKQANLVLKIIEQLPSAKESPDKFLEVCTWVDQIAALNDSKTRKTTSETVRAVLDSLSEKKKSSPAAD

SEQ ID NO: 44 - protein, 167 aa, Artificial
  TableVIII variant 5
MANTKYNKEFLLYLAGFVDGDGSIIAQIKPNQSYKFKHQLSLTFRVTQKTQRRWFLDKLVDEIGVGYVTDRGSVSDYILSEIKPLHNFLTQLQPFLKLKQKQANLVLKIIEQLPSAKESPDKFLEVCTWVDQIAALNDSKTRKTTSETVRAVLDSLSEKKKSSPAAD

SEQ ID NO: 45 - protein, 167 aa, Artificial
  Table VIII variant 6
MANTKYNKEFLLYLAGFVDGDGSIIAQIKPNQSYKFKHQLSLTFNVTQKTQRRWFLDKLVDEIGVGYVYDSGSVSRYVLSEIKPLHNFLTQLQPFLKLKQKQANLVLKIIEQLPSAKESPDKFLEVCTWVDQIAALNDSKTRKTTSETVRAVLDSLSEKKKSSPAAD

SEQ ID NO: 46 - protein, 167 aa, Artificial
  Table VIII variant 7
MANTKYNKEFLLYLAGFVDGDGSIVAQIKPNQSYKFKHQLSLTFAVTQKTQRRWFLDKLVDEIGVGYVRDSGSVSRYYLSEIKPLHNFLTQLQPFLKLKQKQANLVLKIIEQLPSAKESPDKFLEVCTWVDQIAALNDSKTRKTTSETVRAVLDSLSEKKKSSPAAD

SEQ ID NO: 47 - protein, 167 aa, Artificial
  Table VIII variant 8
MANTKYNKEFLLYLAGFVDGDGSIIAQIKPNQSYKFKHQLSLTFNVTQKTQRRWFLDKLVDEIGVGYVRDSGSVSRYNLSEIKPLHNFLTQLQPFLKLKQKQANLVLKIIEQLPSAKESPDKFLEVCTWVDQIAALNDSKTRKTTSETVRAVLDSLSEKKKSSPAAD

SEQ ID NO: 48 - protein, 167 aa, Artificial
  Table VIII variant 9
MANTKYNKEFLLYLAGFVDGDGSIIAQIKPNQSYKFKHQLSLTFAVTQKTQRRWFLDKLVDEIGVGYVRDSGSVSRYYLSEIKPLHNFLTQLQPFLKLKQKQANLVLKIIEQLPSAKESPDKFLEVCTWVDQIAALNDSKTRKTTSETVRAVLDSLSEKKKSSPAAD

SEQ ID NO: 49 - protein, 167 aa, Artificial
  Table VIII variant 10
MANTKYNKEFLLYLAGFVDGDGSIIAQIKPNQSYKFKHQLSLTFNVTQKTQRRWFLDKLVDEIGVGYVEDSGSVSRYRLSEIKPLHNFLTQLQPFLKLKQKQANLVLKIIEQLPSAKESPDKFLEVCTWVDQIAALNDSKTRKTTSETVRAVLDSLSEKKKSSPAAD

SEQ ID NO: 50 - protein, 167 aa, Artificial
  Table VIII variant 11
MANTKYNKEFLLYLAGFVDGDGSIIAQIKPNQSYKFKHQLSLTFRVTQKTQRRWFLDKLVDEIGVGYVNDRGSVSDYILSEIKPLHNFLTQLQPFLKLKQKQANLVLKIIEQLPSAKESPDKFLEVCTWVDQIAALNDSKTRKTTSETVRAVLDSLSEKKKSSPAAD

SEQ ID NO: 51 - protein, 167 aa, Artificial
  Table VIII variant 12
MANTKYNKEFLLYLAGFVDGDGSIIAQIKPNQSYKFKHQLSLTFKVTQKTQRRWFLDKLVDEIGVGYVADRGSVSDYILSEIKPLHNFLTQLQPFLKLKQKQANLVLKIIEQLPSAKESPDKFLEVCTWVDQIAALNDSKTRKTTSETVRAVLDSLSEKKKSSPAAD

SEQ ID NO: 52 - protein, 167 aa, Artificial
  Table VIII variant 13
MANTKYNKEFLLYLAGFVDGDGSIVAQIKPNQSYKFKHQLSLTFNVTQKTQRRWFLDKLVDEIGVGYVRDSGSVSRYNLSEIKPLHNFLTQLQPFLKLKQKQANLVLKIIEQLPSAKESPDKFLEVCTWVDQIAALNDSKTRKTTSETVRAVLDSLSEKKKSSPAAD

SEQ ID NO: 53 - protein, 167 aa, Artificial
  Table VIII variant 14
MANTKYNKEFLLYLAGFVDGDGSIIAQIKPNQSYKFKHQLSLTFTVTQKTQRRWFLDKLVDEIGVGYVEDSGSVSRYRLSEIKPLHNFLTQLQPFLKLKQKQANLVLKIIEQLPSAKESPDKFLEVCTWVDQIAALNDSKTRKTTSETVRAVLDSLSEKKKSSPAAD

SEQ ID NO: 54 - protein, 167 aa, Artificial
  Table VIII variant 15
MANTKYNKEFLLYLAGFVDGDGSIIAQIKPNQSYKFKHQLSLTFAVTQKTQRRWFLDKLVDEIGVGYVYDSGSVSYYKLSEIKPLHNFLTQLQPFLKLKQKQANLVLKIIEQLPSAKESPDKFLEVCTWVDQIAALNDSKTRKTTSETVRAVLDSLSEKKKSSPAAD

SEQ ID NO: 55 - protein, 167 aa, Artificial
  Table VIII variant 16
MANTKYNKEFLLYLAGFVDGDGSIIAQIKPNQSYKFKHQLSLTFNVTQKTQRRWFLDKLVDEIGVGYVYDSGSVSRYYLSEIKPLHNFLTQLQPFLKLKQKQANLVLKIIEQLPSAKESPDKFLEVCTWVDQIAALNDSKTRKTTSETVRAVLDSLSEKKKSSPAAD

SEQ ID NO: 56 - protein, 167 aa, Artificial
  Table VIII variant 17
MANTKYNKEFLLYLAGFVDGDGSIIAQIKPNQSYKFKHQLSLTFAVTQKTQRRWFLDKLVDEIGVGYVRDSGSVSRYLLSEIKPLHNFLTQLQPFLKLKQKQANLVLKIIEQLPSAKESPDKFLEVCTWVDQIAALNDSKTRKTTSETVRAVLDSLSEKKKSSPAAD

SEQ ID NO: 57 - protein, 167 aa, Artificial
  Table VIII variant 18
MANTKYNKEFLLYLAGFVDGDGSIIAQIKPNQSYKFKHQLSLTFTVTQKTQRRWFLDKLVDEIGVGYVKDSGSVSRYRLSEIKPLHNFLTQLQPFLKLKQKQANLVLKIIEQLPSAKESPDKFLEVCTWVDQIAALNDSKTRKTTSETVRAVLDSLSEKKKSSPAAD

SEQ ID NO: 58 - protein, 167 aa, Artificial
  Table VIII variant 19
MANTKYNKEFLLYLAGFVDGDGSIIAQIKPNQSYKFKHQLSLTFNVTQKTQRRWFLDKLVDEIGVGYVYDSGSVSRYILSEIKPLHNFLTQLQPFLKLKQKQANLVLKIIEQLPSAKESPDKFLEVCTWVDQIAALNDSKTRKTTSETVRAVLDSLSEKKKSSPAAD

SEQ ID NO: 59 - protein, 167 aa, Artificial
  Table VIII variant 20
MANTKYNKEFLLYLAGFVDGDGSIVAQIKPNQSYKFKHQLSLTFNVTQKTQRRWFLDKLVDEIGVGYVEDSGSVSRYRLSEIKPLHNFLTQLQPFLKLKQKQANLVLKIIEQLPSAKESPDKFLEVCTWVDQIAALNDSKTRKTTSETVRAVLDSLSEKKKSSPAAD

SEQ ID NO: 60 - protein, 167 aa, Artificial
  Table VIII variant 21
MANTKYNKEFLLYLAGFVDGDGSIVAQIKPNQSYKFKHQLSLTFAVTQKTQRRWFLDKLVDEIGVGYVYDSGSVSRYILSEIKPLHNFLTQLQPFLKLKQKQANLVLKIIEQLPSAKESPDKFLEVCTWVDQIAALNDSKTRKTTSETVRAVLDSLSEKKKSSPAAD

SEQ ID NO: 61 - protein, 167 aa, Artificial
  Table VIII variant 22
MANTKYNKEFLLYLAGFVDGDGSIVAQIKPNQSYKFKHQLSLTFNVTQKTQRRWFLDKLVDEIGVGYVYDSGSVSRYVLSEIKPLHNFLTQLQPFLKLKQKQANLVLKIIEQLPSAKESPDKFLEVCTWVDQIAALNDSKTRKTTSETVRAVLDSLSEKKKSSPAAD

SEQ ID NO: 62 - protein, 167 aa, Artificial
  Table VIII variant 23
MANTKYNKEFLLYLAGFVDGDGSIIAQIKPNQSYKFKHQLSLTFKVTQKTQRRWFLDKLVDEIGVGYVHDSGSVSNYILSEIKPLHNFLTQLQPFLKLKQKQANLVLKIIEQLPSAKESPDKFLEVCTWVDQIAALNDSKTRKTTSETVRAVLDSLSEKKKSSPAAD

SEQ ID NO: 63 - protein, 167 aa, Artificial
  Table VIII variant 24
MANTKYNKEFLLYLAGFVDGDGSIIAQIKPNQSYKFKHQLSLTFRVTQKTQRRWFLDKLVDEIGVGYVADRGSVSDYILSEIKPLHNFLTQLQPFLKLKQKQANLVLKIIEQLPSAKESPDKFLEVCTWVDQIAALNDSKTRKTTSETVRAVLDSLSEKKKSSPAAD

SEQ ID NO: 64 - protein, 167 aa, Artificial
  Table VIII variant 25
MANTKYNKEFLLYLAGFVDGDGSIIAQIKPNQSYKFKHQLSLTFNVTQKTQRRWFLDKLVDEIGVGYVADSGSVSRYYLSEIKPLHNFLTQLQPFLKLKQKQANLVLKIIEQLPSAKESPDKFLEVCTWVDQIAALNDSKTRKTTSETVRAVLDSLSEKKKSSPAAD

SEQ ID NO: 65 - protein, 167 aa, Artificial
  Table VIII variant 26
MANTKYNKEFLLYLAGFVDGDGSIIAQIKPNQSYKFKHQLSLTFDVTQKTQRRWFLDKLVDEIGVGYVADSGSVSKYRLSEIKPLHNFLTQLQPFLKLKQKQANLVLKIIEQLPSAKESPDKFLEVCTWVDQIAALNDSKTRKTTSETVRAVLDSLSEKKKSSPAAD

SEQ ID NO: 66 - protein, 167 aa, Artificial
  Table VIII variant 27
MANTKYNKEFLLYLAGFVDGDGSIVAQIKPNQSYKFKHQLSLTFRVTQKTQRRWFLDKLVDEIGVGYVYDSGSVSNYTLSEIKPLHNFLTQLQPFLKLKQKQANLVLKIIEQLPSAKESPDKFLEVCTWVDQIAALNDSKTRKTTSETVRAVLDSLSEKKKSSPAAD

SEQ ID NO: 67 - protein, 167 aa, Artificial
  Table VIII variant 28
MANTKYNKEFLLYLAGFVDGDGSIVAQIKPNQSYKFKHQLSLTFRVTQKTQRRWFLDKLVDEIGVGYVYDSGSVSNYILSEIKPLHNFLTQLQPFLKLKQKQANLVLKIIEQLPSAKESPDKFLEVCTWVDQIAALNDSKTRKTTSETVRAVLDSLSEKKKSSPAAD

SEQ ID NO: 68 - protein, 167 aa, Artificial
  Table VIII variant 29
MANTKYNKEFLLYLAGFVDGDGSIIAQIKPNQSYKFKHQLSLTFAVTQKTQRRWFLDKLVDEIGVGYVYDSGSVSRYILSEIKPLHNFLTQLQPFLKLKQKQANLVLKIIEQLPSAKESPDKFLEVCTWVDQIAALNDSKTRKTTSETVRAVLDSLSEKKKSSPAAD

SEQ ID NO: 69 - protein, 167 aa, Artificial
  Table VIII variant 30
MANTKYNKEFLLYLAGFVDGDGSIVAQIKPNQSYKFKHQLSLTFIVTQKTQRRWFLDKLVDEIGVGYVEDRGSVSNYRLSEIKPLHNFLTQLQPFLKLKQKQANLVLKIIEQLPSAKESPDKFLEVCTWVDQIAALNDSKTRKTTSETVRAVLDSLSEKKKSSPAAD

SEQ ID NO: 70 - protein, 167 aa, Artificial
  Table VIII variant 31
MANTKYNKEFLLYLAGFVDGDGSIIAQIKPNQSYKFKHQLSLTFNVTQKTQRRWFLDKLVDEIGVGYVRDSGSVSRYILSEIKPLHNFLTQLQPFLKLKQKQANLVLKIIEQLPSAKESPDKFLEVCTWVDQIAALNDSKTRKTTSETVRAVLDSLSEKKKSSPAAD

SEQ ID NO: 71 - protein, 167 aa, Artificial; identical to SEQ ID NO: 55
  Table IX variant 1

SEQ ID NO: 72 - protein, 167 aa, Artificial; identical to SEQ ID NO: 68
  Table IX variant 2

SEQ ID NO: 73 - protein, 167 aa, Artificial; identical to SEQ ID NO: 40
  Table IX variant 3

SEQ ID NO: 74 - protein, 167 aa, Artificial; identical to SEQ ID NO: 58
  Table IX variant 4

SEQ ID NO: 75 - protein, 167 aa, Artificial
  Table IX variant 5
MANTKYNKEFLLYLAGFVDGDGSIIAQIKPNQSYKFKHQLSLTFTVTQKTQRRWFLDKLVDEIGVGYVTDSGSVSKYELSEIKPLHNFLTQLQPFLKLKQKQANLVLKIIEQLPSAKESPDKFLEVCTWVDQIAALNDSKTRKTTSETVRAVLDSLSEKKKSSPAAD

SEQ ID NO: 76 - protein, 167 aa, Artificial
  Table IX variant 6
MANTKYNKEFLLYLAGFVDGDGSIVAQIKPNQSYKFKHQLSLTFKVTQKTQRRWFLDKLVDEIGVGYVTDSGSVSKYELSEIKPLHNFLTQLQPFLKLKQKQANLVLKIIEQLPSAKESPDKFLEVCTWVDQIAALNDSKTRKTTSETVRAVLDSLSEKKKSSPAAD

SEQ ID NO: 77 - protein, 167 aa, Artificial; identical to SEQ ID NO: 47
  Table IX variant 7

SEQ ID NO: 78 - protein, 167 aa, Artificial; identical to SEQ ID NO: 48
  Table IX variant 8

SEQ ID NO: 79 - protein, 167 aa, Artificial; identical to SEQ ID NO: 63
  Table IX variant 9

SEQ ID NO: 80 - protein, 167 aa, Artificial; identical to SEQ ID NO: 44
  Table IX variant 10

SEQ ID NO: 81 - protein, 167 aa, Artificial
  Table IX variant 11
MANTKYNKEFLLYLAGFVDGDGSIVAQIKPNQSYKFKHQLSLTFNVTQKTQRRWFLDKLVDEIGVGYVYDSGSVSYYRLSEIKPLHNFLTQLQPFLKLKQKQANLVLKIIEQLPSAKESPDKFLEVCTWVDQIAALNDSKTRKTTSETVRAVLDSLSEKKKSSPAAD

SEQ ID NO: 82 - protein, 167 aa, Artificial; identical to SEQ ID NO: 64
  Table IX variant 12

SEQ ID NO: 83 - protein, 167 aa, Artificial; identical to SEQ ID NO: 45
  Table IX variant 13

SEQ ID NO: 84 - protein, 167 aa, Artificial
  Table IX variant 14
MANTKYNKEFLLYLAGFVDGDGSIIAQIKPNQSYKFKHQLSLTFNVTQKTQRRWFLDKLVDEIGVGYVTDSGSVSRYYLSEIKPLHNFLTQLQPFLKLKQKQANLVLKIIEQLPSAKESPDKFLEVCTWVDQIAALNDSKTRKTTSETVRAVLDSLSEKKKSSPAAD

SEQ ID NO: 85 - protein, 167 aa, Artificial
  Table IX variant 15
MANTKYNKEFLLYLAGFVDGDGSIIAQIKPNQSYKFKHQLSLTFTVTQKTQRRWFLDKLVDEIGVGYVYDSGSVSYYRLSEIKPLHNFLTQLQPFLKLKQKQANLVLKIIEQLPSAKESPDKFLEVCTWVDQIAALNDSKTRKTTSETVRAVLDSLSEKKKSSPAAD

SEQ ID NO: 86 - protein, 167 aa, Artificial
  Table IX variant 16
MANTKYNKEFLLYLAGFVDGDGSIIAQIKPNQSYKFKHQLSLTFAVTQKTQRRWFLDKLVDEIGVGYVYDSGSVSRYRLSEIKPLHNFLTQLQPFLKLKQKQANLVLKIIEQLPSAKESPDKFLEVCTWVDQIAALNDSKTRKTTSETVRAVLDSLSEKKKSSPAAD

SEQ ID NO: 87 - protein, 167 aa, Artificial
  Table IX variant 17
MANTKYNKEFLLYLAGFVDGDGSIIAQIKPNQSYKFKHQLSLTFNVTQKTQRRWFLDKLVDEIGVGYVYDSGSVSYYRLSEIKPLHNFLTQLQPFLKLKQKQANLVLKIIEQLPSAKESPDKFLEVCTWVDQIAALNDSKTRKTTSETVRAVLDSLSEKKKSSPAAD

SEQ ID NO: 88 - protein, 167 aa, Artificial; identical to SEQ ID NO: 51
  Table IX variant 18

SEQ ID NO: 89 - protein, 167 aa, Artificial
  Table IX variant 19
MANTKYNKEFLLYLAGFVDGDGSIIAQIKPNQSYKFKHQLSLTFRVTQKTQRRWFLDKLVDEIGVGYVHDRGSVSDYILSEIKPLHNFLTQLQPFLKLKQKQANLVLKIIEQLPSAKESPDKFLEVCTWVDQIAALNDSKTRKTTSETVRAVLDSLSEKKKSSPAAD

SEQ ID NO: 90 - protein, 167 aa, Artificial
  Table IX variant 20
MANTKYNKEFLLYLAGFVDGDGSIIAQIKPNQSYKFKHQLSLTFAVTQKTQRRWFLDKLVDEIGVGYVTDSGSVSQYRLSEIKPLHNFLTQLQPFLKLKQKQANLVLKIIEQLPSAKESPDKFLEVCTWVDQIAALNDSKTRKTTSETVRAVLDSLSEKKKSSPAAD

SEQ ID NO: 91 - DNA, 51 bp, Artificial
  HSV2.4 OLIGO
tggcatacaagtttccaggacgccgtacggcgtcctggcaatcgtctgtca

SEQ ID NO: 92 - DNA, 51 bp, Artificial
  HSV2.6 OLIGO
tggcatacaagtttccaggacgccacacggcgtcctggcaatcgtctgtca

SEQ ID NO: 93 - protein, 167 aa, Artificial
  Table X variant 1
MANTKYNKEFLLYLAGFVDGDGSIIAQIEPNQSRKFKHRLKLTFKVTQKTQRRWFLDKLVDEIGVGYVRDDGSVSNYILSEIKPLHNFLTQLQPFLKLKQKQANLVLKIIEQLPSAKESPDKFLEVCTWVDQIAALNDSKTRKTTSETVRAVLDSLSEKKKSSPAAD

SEQ ID NO: 94 - protein, 167 aa, Artificial
  Table X variant 2
MANTKYNKEFLLYLAGFVDGDGSIIAQIEPNQSRKFKHRLKLTFKVTQKTQRRWFLDKLVDEIGVGYVRDEGSVSNYILSEIKPLHNFLTQLQPFLKLKQKQANLVLKIIEQLPSAKESPDKFLEVCTWVDQIAALNDSKTRKTTSETVRAVLDSLSEKKKSSPAAD

SEQ ID NO: 95 - protein, 167 aa, Artificial
  Table X variant 3
MANTKYNKEFLLYLAGFVDGDGSIIAQIEPNQSRKFKHRLKLTFKVTQKTQRRWFLDKLVDEIGVGYVTDGGSVSNYILSEIKPLHNFLTQLQPFLKLKQKQANLVLKIIEQLPSAKESPDKFLEVCTWVDQIAALNDSKTRKTTSETVRAVLDSLSEKKKSSPAAD

SEQ ID NO: 96 - protein, 167 aa, Artificial
  Table X variant 4
MANTKYNKEFLLYLAGFVDGDGSIIAQIEPNQSRKFKHRLKLTFKVTQKTQRRWFLDKLVDEIGVGYVTDSGSVSNYILSEIKPLHNFLTQLQPFLKLKQKQANLVLKIIEQLPSAKESPDKFLEVCTWVDQIAALNDSKTRKTTSETVRAVLDSLSEKKKSSPAAD

SEQ ID NO: 97 - protein, 167 aa, Artificial
  Table X variant 5
MANTKYNKEFLLYLAGFVDGDGSIIAQIEPNQSYKFKHRLKLTFKVTQKTQRRWFLDKLVDEIGVGYVSDSGSVSNYILSEIKPLHNFLTQLQPFLKLKQKQANLVLKIIEQLPSAKESPDKFLEVCTWVDQIAALNDSKTRKTTSETVRAVLDSLSEKKKSSPAAD

SEQ ID NO: 98 - protein, 167 aa, Artificial
  Table X variant 6
MANTKYNKEFLLYLAGFVDGDGSIIAQIKPDQSAKFKHHLSLTFKVTQKTQRRWFLDKLVDEIGVGYVRDDGSVSNYILSEIKPLHNFLTQLQPFLKLKQKQANLVLKIIEQLPSAKESPDKFLEVCTWVDQIAALNDSKTRKTTSETVRAVLDSLSEKKKSSPAAD

SEQ ID NO: 99 - protein, 167 aa, Artificial
  Table X variant 7
MANTKYNKEFLLYLAGFVDGDGSIIAQIKPDQSAKFKHHLSLTFKVTQKTQRRWFLDKLVDEIGVGYVRDEGSVSNYILSEIKPLHNFLTQLQPFLKLKQKQANLVLKIIEQLPSAKESPDKFLEVCTWVDQIAALNDSKTRKTTSETVRAVLDSLSEKKKSSPAAD

SEQ ID NO: 100 - protein, 167 aa, Artificial
  Table X variant 8
MANTKYNKEFLLYLAGFVDGDGSIIAQIKPDQSHKFKHKLSLTFKVTQKTQRRWFLDKLVDEIGVGYVRDDGSVSNYILSEIKPLHNFLTQLQPFLKLKQKQANLVLKIIEQLPSAKESPDKFLEVCTWVDQIAALNDSKTRKTTSETVRAVLDSLSEKKKSSPAAD

SEQ ID NO: 101 - protein, 167 aa, Artificial; identical to SEQ ID NO: 100
  Table X variant 9

SEQ ID NO: 102 - protein, 167 aa, Artificial
  Table X variant 10
MANTKYNKEFLLYLAGFVDGDGSIIAQIKPDQSHKFKHKLSLTFKVTQKTQRRWFLDKLVDEIGVGYVRDEGSVSNYILSEIKPLHNFLTQLQPFLKLKQKQANLVLKIIEQLPSAKESPDKFLEVCTWVDQIAALNDSKTRKTTSETVRAVLDSLSEKKKSSPAAD

SEQ ID NO: 103 - protein, 167 aa, Artificial
  Table X variant 11
MANTKYNKEFLLYLAGFVDGDGSIIAQIKPDQSHKFKHKLSLTFKVTQKTQRRWFLDKLVDEIGVGYVRDTGSVSNYILSEIKPLHNFLTQLQPFLKLKQKQANLVLKIIEQLPSAKESPDKFLEVCTWVDQIAALNDSKTRKTTSETVRAVLDSLSEKKKSSPAAD

SEQ ID NO: 104 - protein, 167 aa, Artificial
  Table X variant 12
MANTKYNKEFLLYLAGFVDGDGSIIAQIKPDQSRKFKHGLSLTFKVTQKTQRRWFLDKLVDEIGVGYVRDDGSVSNYILSEIKPLHNFLTQLQPFLKLKQKQANLVLKIIEQLPSAKESPDKFLEVCTWVDQIAALNDSKTRKTTSETVRAVLDSLSEKKKSSPAAD

SEQ ID NO: 105 - protein, 167 aa, Artificial
  Table X variant 13
MANTKYNKEFLLYLAGFADGDGSIIAQIKPDQSRKFKHGLSLTFKVTQKTQRRWFLDKLVDEIGVGYVRDDGSVSNYILSEIKPLHNFLTQLQPFLKLKQKQANLVLKIIEQLPSAKESPDKFLEVCTWVDQIAALNDSKTRKTTSETVRAVLDSLSEKKKSSPAAD

SEQ ID NO: 106 - protein, 167 aa, Artificial
  Table X variant 14
MANTKYNKEFLLYLAGFVDGDGSIIAQIKPDQSRKFKHGLSLTFKVTQKTQRRWFLDKLVDEIGVGYVRDEGSVSNYILSEIKPLHNFLTQLQPFLKLKQKQANLVLKIIEQLPSAKESPDKFLEVCTWVDQIAALNDSKTRKTTSETVRAVLDSLSEKKKSSPAAD

SEQ ID NO: 107 - protein, 167 aa, Artificial
  Table X variant 15
MANTKYNKEFLLYLAGFVDGDGSIIAQIKPGQSYKFKHGLSLTFKVTQKTQRRWFLDKLVDEIGVGYVRDEGSVSNYILSEIKPLHNFLTQLQPFLKLKQKQANLVLKIIEQLPSAKESPDKFLEVCTWVDQIAALNDSKTRKTTSETVRAVLDSLSEKKKSSPAAD

SEQ ID NO: 108 - protein, 167 aa, Artificial
  Table X variant 16
MANTKYNKEFLLYLAGFVDGDGSIIAQIKPGQSYKFKHGLSLTFKVTQKTQRRWILDKLVDEIGVGYVRDSGSVSNYILSEIKPLHNFLTQLQPFLKLKQKQANLVLKIIEQLPSAKESPDKFLEVCTWVDQIAALNDSKTRKTTSETVRAVLDSLSEKKKSSPAAD

SEQ ID NO: 109 - protein, 167 aa, Artificial
  Table X variant 17
MANTKYNKEFLLYLAGFVDGDGSIIAQIKPGQSYKFKHHLSLTFKVTQKTQRRWFLDKLVDEIGVGYVADGGSVSNYILSEIKPLHNFLTQLQPFLKLKQKQANLVLKIIEQLPSAKESPDKFLEVCTWVDQIAALNDSKTRKTTSETVRAVLDSLSEKKKSSPAAD

SEQ ID NO: 110 - protein, 167 aa, Artificial
  Table X variant 18
MANTKYNKEFLLYLAGFVDGDGSIIAQIKPGQSYKFKHHLSLTFKVTQKTQRRWFLDKLVDEIGVGYVADQGSVSNYILSEIKPLHNFLTQLQPFLKLKQKQANLVLKIIEQLPSAKESPDKFLEVCTWVDQIAALNDSKTRKTTSETVRAVLDSLSEKKKSSPAAD

SEQ ID NO: 111 - protein, 167 aa, Artificial
  Table X variant 19
MANTKYNKEFLLYLAGFVDGDGSIIAQIKPGQSYKFKHHLSLTFKVTQKTQRRWFLDKLVDEIGVGYVADSGSVSNYILSEIKPLHNFLTQLQPFLKLKQKQANLVLKIIEQLPSAKESPDKFLEVCTWVDQIAALNDSKTRKTTSETVRAVLDSLSEKKKSSPAAD

SEQ ID NO: 112 - protein, 167 aa, Artificial
  Table X variant 20
MANTKYNKEFLLYLAGFVDGDGSIIAQIKPGQSYKFKHHLSLTFKVTQKTQRRWFLDKLVDEIGVGYVGDAGSVSNYILSEIKPLHNFLTQLQPFLKLKQKQANLVLKIIEQLPSAKESPDKFLEVCTWVDQIAALNDSKTRKTTSETVRAVLDSLSEKKKSSPAAD

SEQ ID NO: 113 - protein, 167 aa, Artificial
  Table X variant 21
MANTKYNKEFLLYLAGFVDGDGSIIAQIKPGQSYKFKHHLSLTFKVTQKTQRRWFLDKLVDEIGVGYVNDAGSVSNYILSEIKPLHNFLTQLQPFLKLKQKQANLVLKIIEQLPSAKESPDKFLEVCTWVDQIAALNDSKTRKTTSETVRAVLDSLSEKKKSSPAAD

SEQ ID NO: 114 - protein, 167 aa, Artificial
  Table X variant 22
MANTKYNKEFLLYLAGFVDGDGSIIAQIKPGQSYKFKHHLSLTFKVTQKTQRRWFLDKLVDEIGVGYVQDSGSVSNYILSEIKPLHNFLTQLQPFLKLKQKQANLVLKIIEQLPSAKESPDKFLEVCTWVDQIAALNDSKTRKTTSETVRAVLDSLSEKKKSSPAAD

SEQ ID NO: 115 - protein, 167 aa, Artificial
  Table X variant 23
MANTKYNKEFLLYLAGFVDGDGSIIAQIKPGQSYKFKHHLSLTFKVTQKTQRRWFLDKLVDEIGVGYVRDDGSVSNYILSEIKPLHNFLTQLQPFLKLKQKQANLVLKIIEQLPSAKESPDKFLEVCTWVDQIAALNDSKTRKTTSETVRAVLDSLSEKKKSSPAAD

SEQ ID NO: 116 - protein, 167 aa, Artificial
  Table X variant 24
MANTKYNKEFLLYLAGFVDGDGSIIAQIKPGQSYKFKHQLSLTFKVTQKTQRRWFLDKLVDEIGVGYVRDEGSVSNYILSEIKPLHNFLTQLQPFLKLKQKQANLVLKIIEQLPSAKESPDKFLEVCTWVDQIAALNDSKTRKTTSETVRAVLDSLSEKKKSSPAAD

SEQ ID NO: 117 - protein, 167 aa, Artificial
  Table X variant 25
MANTKYNKEFLLYLAGFVDGDGSIIAQIKPGQSYKFKHHLSLTFKVTQKTQRRWFLDKLVDEIGVGYVRDNGSVSDYILSEIKPLHNFLTQLQPFLKLKQKQANLVLKIIEQLPSAKESPDKFLEVCTWVDQIAALNDSKTRKTTSETVRAVLDSLSEKKKSSPAAD

SEQ ID NO: 118 - protein, 167 aa, Artificial
  Table X variant 26
MANTKYNKEFLLYLAGFVDGDGSIIAQIKPGQSYKFKHHLSLTFKVTQKTQRRWFLDKLVDEIGVGYVRDSGSVSNYILSEIKPLHNFLTQLQPFLKLKQKQANLVLKIIEQLPSAKESPDKFLEVCTWVDQIAALNDSKTRKTTSETVRAVLDSLSEKKKSSPAAD

SEQ ID NO: 119 - protein, 167 aa, Artificial
  Table X variant 27
MANTKYNKEFLLYLAGFVDGDGSIIAQIKPGQSYKFKHHLSLTFKVTQKTQRRWFLDKLVDEIGVGYVSDDGSVSNYILSEIKPLHNFLTQLQPFLKLKQKQANLVLKIIEQLPSAKESPDKFLEVCTWVDQIAALNDSKTRKTTSETVRAVLDSLSEKKKSSPAAD

SEQ ID NO: 120 - protein, 167 aa, Artificial
  Table X variant 28
MANTKYNKEFLLYLAGFVDGDGSIIAQIKPGQSYKFKHHLSLTFKVTQKTQRRWFLDKLVDEIGVGYVTDSGSVSNYILSEIKPLHNFLTQLQPFLKLKQKQANLVLKIIEQLPSAKESPDKFLEVCTWVDQIAALNDSKTRKTTSETVRAVLDSLSEKKKSSPAAD

SEQ ID NO: 121 - protein, 167 aa, Artificial
  Table X variant 29
MANTKYNKEFLLYLAGFVDGDGSIIAQIKPGQSYKFKHRLSLTFKVTQKTQRRWFLDKLVDEIGVGYVADGGSVSNYILSEIKPLHNFLTQLQPFLKLKQKQANLVLKIIEQLPSAKESPDKFLEVCTWVDQIAALNDSKTRKTTSETVRAVLDSLSEKKKSSPAAD

SEQ ID NO: 122 - protein, 167 aa, Artificial
  Table X variant 30
MANTKYNKEFLLYLAGFVDGDGSIIAQIKPGQSYKFKHRLSLTFKVTQKTQRRWFLDKLVDEIGVGYVADNGSVSNYILSEIKPLHNFLTQLQPFLKLKQKQANLVLKIIEQLPSAKESPDKFLEVCTWVDQIAALNDSKTRKTTSETVRAVLDSLSEKKKSSPAAD

SEQ ID NO: 123 - protein, 167 aa, Artificial
  Table X variant 31
MANTKYNKEFLLYLAGFVDGDGSIIAQIKPGQSYKFKHRLSLTFKVTQKTQRRWFLDKLVDEIGVGYVADQGSVSNYILSEIKPLHNFLTQLQPFLKLKQKQANLVLKIIEQLPSAKESPDKFLEVCTWVDQIAALNDSKTRKTTSETVRAVLDSLSEKKKSSPAAD

SEQ ID NO: 124 - protein, 167 aa, Artificial
  Table X variant 32
MANTKYNKEFLLYLAGFVDGDGSIIAQIKPGQSYKFKHRLSLTFKVTQKTQRRWFLDKLVDEIGVGYVGDSGSVSNYILSEIKPLHNFLTQLQPFLKLKQKQANLVLKIIEQLPSAKESPDKFLEVCTWVDQIAALNDSKTRKTTSETVRAVLDSLSEKKKSSPAAD

SEQ ID NO: 125 - protein, 167 aa, Artificial
  Table X variant 33
MANAKYNKEFLLYLAGFVDGDGSIIAQIKPGQSYKFKHRLSLTFKVTQKTQRRWFLDKLVDEIGVGYVGDSGSVSNYILSEIKPLHNFLTQLQPFLKLKQKQANLVLKIIEQLPSAKESPDKFLEVCTWVDQIAALNDSKTRKTTSETVRAVLDSLSEKKKSSPAAD

SEQ ID NO: 126 - protein, 167 aa, Artificial
  Table X variant 34
MANTKYNKEFLLYLAGFVDGDGSIIAQIKPGQSYKFKHRLSLTFKVTQKTQRRWFLDKLVDEIGVGYVHDSGSVSNYILSEIKPLHNFLTQLQPFLKLKQKQANLVLKIIEQLPSAKESPDKFLEVCTWVDQIAALNDSKTRKTTSETVRAVLDSLSEKKKSSPAAD

SEQ ID NO: 127 - protein, 167 aa, Artificial
  Table X variant 35
MANTKYNKEFLLYLAGFVDGDGSIIAQIKPGQSYKFKHRLSLTFKVTQKTQRRWFLDKLVDEIGVGYVQDDGSVSDYILSEIKPLHNFLTQLQPFLKLKQKQANLVLKIIEQLPSAKESPDKFLEVCTWVDQIAALNDSKTRKTTSETVRAVLDSLSEKKKSSPAAD

SEQ ID NO: 128 - protein, 167 aa, Artificial
  Table X variant 36
MANTKYNKEFLLYLAGFVDGDGSIIAQIKPGQSYKFKHRLSLTFKVTQKTQRRWFLDKLVDEIGVGYVQDSGSVSNYILSEIKPLHNFLTQLQPFLKLKQKQANLVLKIIEQLPSAKESPDKFLEVCTWVDQIAALNDSKTRKTTSETVRAVLDSLSEKKKSSPAAD

SEQ ID NO: 129 - protein, 167 aa, Artificial
  Table X variant 37
MANTKYNKEFLLYLAGFVDGDGSIIAQIKPGQSYKFKHRLSLTFKVTQKTQRRWFLDKLVDEIGVGYVRDDGSVSNYILSEIKPLHNFLTQLQPFLKLKQKQANLVLKIIEQLPSAKESPDKFLEVCTWVDQIAALNDSKTRKTTSETVRAVLDSLSEKKKSSPAAD

SEQ ID NO: 130 - protein, 167 aa, Artificial
  Table X variant 38
MANTKYNKEFLLYLAGFVDGDGSIIAQIKPGQSYKFKHRLSLTFKVTQKTQRRWFLDKLVDEIGVGYVRDEGSVSNYILSEIKPLHNFLTQLQPFLKLKQKQANLVLKIIEQLPSAKESPDKFLEVCTWVDQIAALNDSKTRKTTSETVRAVLDSLSEKKKSSPAAD

SEQ ID NO: 131 - protein, 167 aa, Artificial
  Table X variant 39
MANTKYNKEFLLYLAGFVDGDGSIIAQIKPGQSYKFKHRLSLTFKVTQKTQRRWFLDKLVDEIGVGYVRDNGSVSNYILSEIKPLHNFLTQLQPFLKLKQKQANLVLKIIEQLPSAKESPDKFLEVCTWVDQIAALNDSKTRKTTSETVRAVLDSLSEKKKSSPAAD

SEQ ID NO: 132 - protein, 167 aa, Artificial
  Table XI variant 1
MANTKYNKEFLLYLAGFVDGDGSIIAQIEPNQSYKFKHRLKLTFKVTQKTQRRWFLDKLVDEIGVGYVRDEGSVSNYILSEVKPLHNFLTQLQPFLRLKQKQANLVLKIIEQLPSAKESPDKFLEVCTWVDQIAALNDSKTRKTTSETVRAVLVSLSEKKRSSPAAD

SEQ ID NO: 133 - protein, 167 aa, Artificial
  Table XI variant 2
MANTKYNKEFLLYLAGFVDGDGSIIAQIEPNQSYKFKHRLKLTFKVTQKTQRRWFLDKLVDEIGVGYVSDSGSVSNYILSEIKPLHNFLTQLQPSLKLKQKQANLVLKIIEQLPSAKESPDKFLEVCTWVDQVAALNDSKTRKTTSETVRTVLDSLSEKKKSSPAAD

SEQ ID NO: 134 - protein, 167 aa, Artificial; identical to SEQ ID NO: 108
  Table XI variant 3

SEQ ID NO: 135 - protein, 167 aa, Artificial
  Table XI variant 4
MANTKYNKEFLLYLAGFVDGDGSIIAQIEPNQSYKFKHRLKLTFKVTQKTQRRWFLDKLVDEIGVGYVRDEGSVSNYILSEIKPLHNFLTQLQPFLKLKQKQANLVLKIIEQLPSAKESPDKFLEVCTWVDQIAALNDSKTRKTTSETVRAVLDSLSEKKKSSTAAD

SEQ ID NO: 136 - protein, 167 aa, Artificial
  Table XI variant 5
MANTKYNKEFLLYLAGFVDGDGSIIAQIEPNQSYKFKHRLKLTFKVTQKTQRRWFLDKLVDEIGVGYVRDEGSVSNYILSEIKPLHNFLTQLQPFLKLKQKQANLVLKIIEQLPSAKESPDKFLEVCTWVDQIAALNDSKTRKTTSETVRAVLDSLSEKKKSSPAAD

SEQ ID NO: 137 - protein, 167 aa, Artificial; identical to SEQ ID NO: 97
  Table XI variant 6

SEQ ID NO: 138 - protein, 167 aa, Artificial; identical to SEQ ID NO: 118
  Table XI variant 7

SEQ ID NO: 139 - protein, 167 aa, Artificial
  Table XI variant 8
MANTKYNKEFLLYLAGFVDGDGSIIAQIEPNQSYKFKHRLKLTFKVTQKTQRRWFLDKLVDEIGVGYVRDEGSVSNYTLSEIKPLHNFLTQLQPFLKLKQKQANLVLKIIEQLPSAKESPDKFLEVCTWVDQIAALNDSKTRKTTSETVRAVLDSLSEKKKSSPAAD

SEQ ID NO: 140 - protein, 167 aa, Artificial
  Table XI variant 9
MANTKYNKEFLLYLAGFVDGDGSIIAQIKPGQSYKFKHRLSLTFKVTQKTQRRWFLDKLVDEIGVGYVRDSGSVSNYILSEIKPLHNFLTQLQPFLKLKQKQANLVLKIIEQLPSAKESPDKFLEVCTWVDQIAALNDSKTRKTTSETVRAVLDSLSEKKKSFPAAD

SEQ ID NO: 141 - protein, 167 aa, Artificial; identical to SEQ ID NO: 129
  Table XI variant 10

SEQ ID NO: 142 - protein, 167 aa, Artificial
  Table XI variant 11
MANTKYNKEFLLYLAGFVDGDGSIIAQIKPGQSYKFKHRLSLTFKVTQKTQRRWFLDKLVDEIGVGYVSDSGSVSNYILSEIKPLHNFLTQLQPFLKLKQKQANLVLKIIEQLPSAKESPDKFLEVCTWVDQIAALNDSKTRKTTSETVRAVLDSLSEKKKSSPAAD

SEQ ID NO: 143 - protein, 167 aa, Artificial
  Table XI variant 12
MANTKYNKEFLLYLAGFVDGDGSIIAQIKPGQSYKFKHRLSLTFKVTQKTQRRWFLDKLVDEIGVGYVRDSGSVSNYILSEIKPLHNFLTQLQPFLKLKQKQANLVLKIIEQLPSAKESPDKFLEVCTWVDQIAALNDSKTRKTTSETVRAVLDSLSEKKKSSPAAD

SEQ ID NO: 144 - protein, 167 aa, Artificial
  Table XI variant 13
MANTKYNKEFLLYLAGFVDGDGSIIAQIKPGQSYKFKHRLSLTFKVTQKTQRRWFLDKLVDEIGVGYVTDSGSVSNYILSEIKPLHNFLTQLQPFLKLKQKQANLVLKIIEQLPSAKESPDKFLEVCTWVDQIAALNDSKTRKTTSETVRAVLDSLSEKKKSSPAAD

SEQ ID NO: 145 - protein, 167 aa, Artificial
  Table XI variant 14
MANTKYNKEFLLYLAGFVDGDGSIIAQIKPGQSYKFKHRLSLTFKVTQKTQRRWFLDKLVDEVGVGYVRDSGSVSNYILSEIKPLHNFLTQLQPFLKLKQKQANLVLKIIEQLPSAKESPDKFLEVCTWVDQIAALNDSKTRKTTSETVRAVLDSLSEKKKSSPAAD

SEQ ID NO: 146 - protein, 167 aa, Artificial; identical to SEQ ID NO: 128
  Table XI variant 15

SEQ ID NO: 147 - protein, 167 aa, Artificial; identical to SEQ ID NO: 115
  Table XI variant 16

SEQ ID NO: 148 - protein, 167 aa, Artificial; identical to SEQ ID NO: 130
  Table XI variant 17

SEQ ID NO: 149 - protein, 167 aa, Artificial
  Table XI variant 18
MANTKYNKEFLLYLAGFVDGDGSIIAQIKPGQSYKFKHRLSLTFKVTQKTQRRWFLDKLVDEIGVGYVTDGGSVSNYILSEIKPLHNFLTQLQPFLKLKQKQANLVLKIIEQLPSAKESPDKFLEVCTWVDQIAALNDSKTRKTTSETVRAVLDSLSEKKKSSPAAD

SEQ ID NO: 150 - protein, 167 aa, Artificial; identical to SEQ ID NO: 125
  Table XI variant 19

SEQ ID NO: 151 - protein, 167 aa, Artificial; identical to SEQ ID NO: 131
  Table XI variant 20

SEQ ID NO: 152 - DNA, 51 bp, Artificial
  HSV2 OLIGO
tggcatacaagtttataaactcacacacggcgtcctggcaatcgtctgtca

SEQ ID NO: 153 - protein, 167 aa, Artificial; identical to SEQ ID NO: 133
  Table XII HSV2.4 variant 1

SEQ ID NO: 154 - protein, 167 aa, Artificial; identical to SEQ ID NO: 136
  Table XII HSV2.4 variant 2

SEQ ID NO: 155 - protein, 167 aa, Artificial; identical to SEQ ID NO: 139
  Table XII HSV2.4 variant 3

SEQ ID NO: 156 - protein, 167 aa, Artificial; identical to SEQ ID NO: 135
  Table XII HSV2.4 variant 4

SEQ ID NO: 157 - protein, 167 aa, Artificial; identical to SEQ ID NO: 108
  Table XII HSV2.4 variant 5

SEQ ID NO: 158 - protein, 167 aa, Artificial; identical to SEQ ID NO: 97
  Table XII HSV2.4 variant 6

SEQ ID NO: 159 - protein, 167 aa, Artificial
  Table XII HSV2.3 variant 1
MANTKYNKEFLLYLAGFVDGDGSIIAQIKPNQSYKFKHQLSLTFAVTQKTQRRWFLDKLVDEIGVGYVYDSGSVSDYILSEIKPLHNFLTQLQPFLKLKQKQANLVLKIIEQLPSAKESPDKFLEVCTWVDQIAALNDSKTRKTTSETVRAVLDSLSEKKKSSPAAD

SEQ ID NO: 160 - protein, 167 aa, Artificial; identical to SEQ ID NO: 47
  Table XII HSV2.3 variant 2

SEQ ID NO: 161 - protein, 167 aa, Artificial; identical to SEQ ID NO: 40
  Table XII HSV2.3 variant 3

SEQ ID NO: 162 - protein, 167 aa, Artificial; identical to SEQ ID NO: 48
  Table XII HSV2.3 variant 4

SEQ ID NO: 163 - protein, 167 aa, Artificial; identical to SEQ ID NO: 75
  Table XII HSV2.3 variant 5

SEQ ID NO: 164 - protein, 167 aa, Artificial; identical to SEQ ID NO: 55
  Table XII HSV2.3 variant 6

SEQ ID NO: 165 - protein, 167 aa, Artificial; identical to SEQ ID NO: 58
  Table XII HSV2.3 variant 7

SEQ ID NO: 166 - protein, 167 aa, Artificial
  Table XII HSV2.3 variant 8
MANTKYNKEFLLYLAGFVDGDGSIVAQIKPNQSYKFKHQLSLTFTVTQKTQRRWFLDKLVDEIGVGYVTDSGSVSKYELSEIKPLHNFLTQLQPFLKLKQKQANLVLKIIEQLPSAKESPDKFLEVCTWVDQIAALNDSKTRKTTSETVRAVLDSLSEKKKSSPAAD

SEQ ID NO: 167 - protein, 167 aa, Artificial; identical to SEQ ID NO: 44
  Table XII HSV2.3 variant 9

SEQ ID NO: 168 - protein, 167 aa, Artificial; identical to SEQ ID NO: 63
  Table XII HSV2.3 variant 10

SEQ ID NO: 169 - DNA, 59 bp, Artificial
  preATGCreFor
gcataaattactatacttctatagacacgcaaacacaaatacacagcggccttgccacc

SEQ ID NO: 170 - DNA, 48 bp, Artificial
  ICreIpostRev
ggctcgaggagctcgtctagaggatcgctcgagttatcagtcggccgc

SEQ ID NO: 171 - protein, 167 aa, Artificial; identical to SEQ ID NO: 68
  Table XIII variant 1

SEQ ID NO: 172 - protein, 167 aa, Artificial; identical to SEQ ID NO: 47
  Table XIII variant 2

SEQ ID NO: 173 - protein, 167 aa, Artificial; identical to SEQ ID NO: 40
  Table XIII variant 3

SEQ ID NO: 174 - protein, 167 aa, Artificial; identical to SEQ ID NO: 48
  Table XIII variant 4

SEQ ID NO: 175 - protein, 167 aa, Artificial; identical to SEQ ID NO: 75
  Table XIII variant 5

SEQ ID NO: 176 - protein, 167 aa, Artificial; identical to SEQ ID NO: 55
  Table XIII variant 6

SEQ ID NO: 177 - protein, 167 aa, Artificial; identical to SEQ ID NO: 48
  Table XIV variant 1

SEQ ID NO: 178 - protein, 167 aa, Artificial
  Table XIV variant 2
MANTKYNKEFLLYLAGFVDGDGSIIAQIKPNQSYKFKHQLSLTFDVTQKTQRRWFLDKLVDEIGVGYVTDSGSVSRYHLSEIKPLHNFLTQLQPFLKLKQKQANLVLKIIEQLPSAKESPDKFLEVCTWVDQIAALNDSKTRKTTSETVRAVLDSLSEKKKSSPAAD

SEQ ID NO: 179 - protein, 167 aa, Artificial
  Table XIV variant 3
MANTKYNKEFLLYLAGFVDGDGSIIAQIKPNQSYKFKYQLSLTFDVTQKTQRRWFLDKLVDEIGVGYVTDSGSVSRYPLSEIKPLHNFLTQLQPFLKLKQKQANLVLKIIEQLPSAKESPDKFLEVCTWVDQIAALNDSKTRKTTSETVRAVLDSLSEKKKSSPAAD

SEQ ID NO: 180 - protein, 167 aa, Artificial
  Table XIV variant 4
MANTKYNKEFLLYLAGFVDGDGSIIAQIKPNQSYKFKHQLSLTFDVTQKTQRRWFLDKLVDEIGVGYVTDSGSVSRYRLSEIKPLHNFLTQLQPFLKLKQKQANLVLKIIEQLPSAKESPDKFLEVCTWVDQIAALNDSKTRKTTSETVRAVLDSLSEKKKSSPAAD

SEQ ID NO: 181 - protein, 167 aa, Artificial
  Table XIV variant 5
MANTKYNKEFLLYLAGFVDGDGSIIAQIKPNQSYKFKHQLSLTFDVTQKTQRRWFLDKLVDEIGVGYVTDSGSVSRYRLSEIKPLHNFLTQLQPFLKLKQRQANLVLKIIEQLPSAKESPDKFLEVCTWVDQIAALNDSKTRKTTSETVRAVLDSLSEKKKSSPAAD

SEQ ID NO: 182 - protein, 167 aa, Artificial
  Table XIV variant 6
MANTKYNKEFLLHLAGFVDGDGSIIAQIKPNQSYKFKHQLSLTFDVTQKTQRRWFLDKLVDEIGVGYVTDSGSVSRYRLSEIKPLHNFLTQLQPFLKLKQKQANLVLKIIEQLPSAKESPDKFLEVCTWVDQIAALNDSKTRKTTSETVRAVLDSLSEKKKSSPAAD

SEQ ID NO: 183 - protein, 167 aa, Artificial
  Table XIV variant 7
MANTKYNKEFLLYLAGFVDGDGSIIAQIKPNQSYKFKHQLSLTFDVTQKTQRRWFLDKLVDEIGVGYVTDSGSVSRYRLSEIKPLHNFLTQLQPFLKLKQKQANLVLKIIEQLPSAKESPDKFLEVCTWVDQIAALNDSKTRKTTSETVRAVLDSLGEKKKSSPAAD

SEQ ID NO: 184 - protein, 167 aa, Artificial
  Table XIV variant 8
MADTKYNKEFLLYLAGFVDGDGSIIAQIKPNQSYKFKYQLSLTFDVTQKTQRRWFLDKLVDEIGVGYVTDSGSVSRYRLSEIKPLHNFLTQLQPFLKLKQKQANLVLKIIEQLPSAKESPDKFLEVCTWADQIAALNDSKTRKTTSETVRAVLDSLSEKKKSSPAAD

SEQ ID NO: 185 - protein, 167 aa, Artificial
  Table XIV variant 9
MANTKYNKEFLLYLAGFVDGDGSIIAQIKPNQSYKFKCQLSLTFDVTQKTQRRWFLDKLVDEIGVGYVTDSGSVSRYILSEIKPLHNFLTQLQPFLKLKQKQANLALKIIEQLPSAKESPDKFLEVCTWVDQIAALNDSKTRKTTSETVRAVLDSLSEKKKSSPAAD

SEQ ID NO: 186 - protein, 167 aa, Artificial
  Table XIV variant 10
MANTKYNKEFLLYLAGFVDGDGSIIAQIKPNQSYKFKYQLSLTFDVTQKTQRRWFLDKLVDEIGVGYVTDSGSVSRYRLSEIKPLHNFLTQLQPFLKLKQKQANLVLKIIEQLPSAKESPDKFLEVCTWVDQIAALNDSKTRKTTSETVRAVLDSLSEKKKSSPAAD

SEQ ID NO: 187 - protein, 167 aa, Artificial
  Table XIV variant 11
MANTKYNKEFLLYLAGFVDGDGSIIAQIKPNQSYKFKYQLSLTFDVTQKTQRRWFLDKLVDEIGVGYVTDSGSVSRYRLSEIKPLHNFLTQLQPFLKLKQKQANLVLKIIEQLPTAKESPDKFLEVCTWVDQIAALNDSKTRKTTSETVRAVLDSLSEKKKSSPAAD

SEQ ID NO: 188 - protein, 167 aa, Artificial
  Table XIV variant 12
MANTKYNKEFLLYLAGFVDGDGSIIAQIKPNQSYKFKYQLSLTFDVTQKTQRRWFLDKLVDEIGVGYVTDSGSVSRYRLSEIKPLHNFLTQLQPFLKLKQKQANLVLKIIEQLPSAKESPDKFLEVCTWVDRIAALNDSKTRKTTSETVRAVLDSLSEKKKSSPAAD

SEQ ID NO: 189 - protein, 167 aa, Artificial
  Table XIV variant 13
MANTKYNKEFLLYLAGFVDGDGSIIAQIKPNQSYKFKYQLSLTFDVTQKTQRRWFLDKLVDEIGVGYVTDSGSVSRYRLSEIKPLHNFLTQLQPFLKLKQKQANLVLKIIEQLPSAKESPDKFLEVCTWADQIAALNDSKTRKTTSETVRAVLDSLSEKKKSSPAAD

SEQ ID NO: 190 - protein, 167 aa, Artificial
  Table XIV variant 14
MANTKYNKEFLLYLAGFVDGDGSIIAQIKPNQSYKFKYQLSLTFDVTQKTQRRWFLDKLVDEIGVGHVTDSGSVSRYRLSEIKPLHNFLTQLQPFLKLKQKQANLVLKIIEQLPSAKESPDKFLEVCTWVDQIAALNDSKTRKTTSETVRAVLDSLSEKKKSSPAAD

SEQ ID NO: 191 - protein, 167 aa, Artificial
  Table XIV variant 15
MANTKYNKEFLLYLAGFVDGDGSIIAQIKPNQSYKFKYQLSLTFDVTQKTQRRWFLDKLVDEIGVGYVTDSGSVSRYRLSEIRPLHNFLTQLQPFLKLKQKQANLVLKIIEQLPSAKESPDKFLEVCTWVDQIAALNDSKTRKTTSETVRAVLDSLSEKKKSSPAAD

SEQ ID NO: 192 - protein, 167 aa, Artificial
  Table XIV variant 16
MANTRYNKEFLLYLAGFVDGDGSIIAQIKPNQSYKFKHQLSLTFDVTQKTQRRWFLDKLVDEIGVGYVTDSGSVSRYRLSEIKPLHNFLTQLQPFLKLKQKQANLVLKIIEQLPSAKESPDKFLEVCTWVDQIAALNDSKTRKTTSETVRAALDSLSEKKKSSPAAD

SEQ ID NO: 193 - protein, 167 aa, Artificial
  Table XIV variant 17
MANTRYNKEFLLYLAGFVDGDGSIIAQIKPNQSYKFKYQLSLTFDVTQKTQRRWFLDKLVDEIGVGYVTDSGSVSRYRLSEIKPLHNFLTQLQPFLKLKQKQANLVLKIIEQLPSAKESPDKFLEVCTWVDQIAALNDSKTRKTTSETVRAALDSLSEKKKSSPAAD

SEQ ID NO: 194 - protein, 167 aa, Artificial
  Table XIV variant 18
MANTKYNKEFLLYLAGFVDGDGSIIAQIKPNQSYKFKHQLSLTFDVTQKTQRRWFLDELVDEIGVGYVTDSGSVSRYRLSEIKPLHNFLTQLQPFLKLKQKQANLVLKIIEQLPSAKESPDKFLEVCTWVDQIAALNDSKTRKTTSETVRAVLDSLSEKRKSSPAAD

SEQ ID NO: 195 - protein, 167 aa, Artificial; identical to SEQ ID NO: 3
  Table XIV variant 19

SEQ ID NO: 196 - protein, 167 aa, Artificial
  Table XIV variant 20
MANTKYSKEFLLYLAGFVDGDGSIIAQIKPNQSYKFKYQLSLTFDVTQKTQRRWFLDKLVDEIGVGYVTDSGSVSRYRLSEIKPLHNFLTQLQPFLKLKQKQANLVLKIIEQLPSAKESPDKFLEVCTWVDQIAALNDSKTRKTTSETVRAVLDSLSEKKKSSPAAD

SEQ ID NO: 197 - protein, 167 aa, Artificial; identical to SEQ ID NO: 33
  Table XIV variant 21

SEQ ID NO: 198 - protein, 167 aa, Artificial
  Table XIV variant 22
MANTKYNKEFLLYLAGFVDGDGSIIAQIKPNQSYKFKHQLSLTFHVTQKTQRRWFLDKLVDEIGVGYVTDPGSVSRYRLSEIKPLHNFLTQLQPFLKLKQKQANLVLKIIEQLPSAKESPDKFLEVCTWVDQIAALNDSKTRKTTSETVRAVLDSLSEKKKSSPAAD

SEQ ID NO: 199 - protein, 167 aa, Artificial; identical to SEQ ID NO: 40
  Table XIV variant 23

SEQ ID NO: 200 - protein, 167 aa, Artificial
  Table XIV variant 24
MANTKYNKEFLLYLAGFVDGDGSIIAQIKPNQSYKFKHQLSLTFNVTQKTQRRWFLDKLVDEIGVGYVRDSGSVSRYYLSEIKPLHNFLTQLQPFLKLKQKQANLVLKIIEQLPSAKESPDKFLEVCTWVDQIAALNDSKTRKTTSETVRAVLDSLSGKKKSSPAAD

SEQ ID NO: 201 - protein, 167 aa, Artificial; identical to SEQ ID NO: 3
  Table XIV variant 25

SEQ ID NO: 202 - protein, 167 aa, Artificial
  Table XIV variant 26
MANTKYNKEFLLYLAGFVDGDGSIIAQIKPNQSYKFKHQLSLTFNVTQKTQRRWFLDKLVDEIGVGYVYDSGSVSRYILSEIKPLHNFLTQLQPFLKLKQKQANLVLKIIEQLPSAKESPDKFLEVCTWVDQVAALNDSKTRKTTSETVRAVLDSLSEKKKSSPAAD

SEQ ID NO: 203 - protein, 167 aa, Artificial; identical to SEQ ID NO: 55
  Table XIV variant 27

SEQ ID NO: 204 - protein, 167 aa, Artificial
  Table XIV variant 28
MANTKYNKEFLLYLAGFVDGDGSIIAQIKPNQSYKFKHQLSLTFRVTQKTQRRWSLDKLVDEIGVGYVADRGSVSDYILSEIKPLHNFLTQLQPFLKLKQKQANLVLKIIEQLPSAKESPDKFLEVCTWVDQIAALNDSKTRKTTSETVRAVLDSLSEKKKSSPAAD

SEQ ID NO: 205 - protein, 167 aa, Artificial; identical to SEQ ID NO: 44
  Table XIV variant 29

SEQ ID NO: 206 - protein, 167 aa, Artificial
  Table XIV variant 30
MANTKYNKEFLLYLAGFVDGDGSIIAQIKPNQSYKFKHQLSLTFRVTQKTQRRWLLDKLVDEIGVGYVTDRGSVSDYILSEIKPLHNFLTQLQPFLKLKQKQANLVLKIIEQLPSAKESPDEFLEVCTWVDQIAALNDSKTRKTTSETVRAVLDSLSEKKKSSPAAD

SEQ ID NO: 207 - protein, 167 aa, Artificial
  Table XIV variant 31
MANTKYNKEFLLYLAGFVDGDGSIIAQIKPNQSYKFKHQLSLTFTVTQKTQRRWFLDKLVDEIGVGYVTDSGSVSRYQLSEIKPLHNFLTQLQPFLKLKQKQANLVLKIIEQLPSAKESPDKFLEVCTWVDQIAALNDSKTRKTTSETVRAVLDSLSEKKKSSPAAD

SEQ ID NO: 208 - protein, 167 aa, Artificial
  Table XIV variant 32
MANTKYNKEFLLYLAGFVDGDGSIVAQIKPNQSYKFKHQLSLTFDVTQKTQRRWFLDKLVDEIGVGYVTDSGSVSRYRLSEIKPLHNFLTQLQPFLKLKQKQANLVLKIIEQLPSAKESPDKFLEVCTWVDQIAALNDSKTRKTTSETVRAVLDSLSEKKKSSPAAD

SEQ ID NO: 209 - protein, 167 aa, Artificial; identical to SEQ ID NO: 133
  Table XV variant 1

SEQ ID NO: 210 - protein, 167 aa, Artificial; identical to SEQ ID NO: 136
  Table XV variant 2

SEQ ID NO: 211 - protein, 167 aa, Artificial; identical to SEQ ID NO: 139
  Table XV variant 3

SEQ ID NO: 212 - protein, 167 aa, Artificial; identical to SEQ ID NO: 135
  Table XV variant 4

SEQ ID NO: 213 - protein, 167 aa, Artificial; identical to SEQ ID NO: 108
  Table XV variant 5

SEQ ID NO: 214 - protein, 167 aa, Artificial; identical to SEQ ID NO: 97
  Table XV variant 6

SEQ ID NO: 215 - protein, 167 aa, Artificial; identical to SEQ ID NO: 136
  Table XVI variant 1

SEQ ID NO: 216 - protein, 167 aa, Artificial
  Table XVI variant 2
MANTKYNKEFLLYLAGFVDGDGSIIAQIEPNQSYKFKHRLKLTFKVTQKTRRRWFLDKLVDEIGVGYVRDEGSVSNYTLSEIKPLHNFLTQLQPFLKLKQKQANLVLKIIEQLPSAKESPDKFLEVCTWVDQIAALNDSKTRKTTSETVRAVLDSLSEKKKSSPAAD

SEQ ID NO: 217 - protein, 167 aa, Artificial
  Table XVI variant 3
MANTKYNKEFLLYLAGFVDGDGSIIAQIEPNQSYKFKHRLKLTFKVTQKTQRRWFLDKLVDEIGVGYVRDEGSVSNYTLSKIKPLHNFLTQLQPFLKLKQKQANLVLKIIEQLPSAKESPDKFLEVCTWVDQIAALNDSKTRKTTSETVRAVLDSLSEKKKSSPAAD

SEQ ID NO: 218 - protein, 167 aa, Artificial
  Table XVI variant 4
MANTKYNKEFLLYLAGFADGDGSIIAQIEPNQSYKFKHRLKLTFKVTQKTQRRWFLDKLVDEIGVGYVRDEGSVSNYTLSEIKPLHNFLTQLQPFLKLKQKQANLVLKIIEQLPSAKESPDKFLEVCTWVDQVAALNDSKTRKTTSETVRTVLDSLSEKKKSSPAAD

SEQ ID NO: 219 - protein, 167 aa, Artificial
  Table XVI variant 5
MANTKYNKEFLLYLAGFVDGDGSIIAQIEPNQSYKFKHRLKLTFKVTQKTQRRWFLDKLVDEIGVGYVRDGGSVSNYILSEIKPLHNFLTQLQPFLKLKQKQANLVLKIIEQLPSAKESPDKFLEVCTWVDQVAALNDSKTRKTTSETVRTVLDSLSEKKKSSPAAD

SEQ ID NO: 220 - protein, 167 aa, Artificial
  Table XVI variant 6
MANTKYNKEFLLYLAGFVDGDGSIIAQIEPNQSYKFKHRLKLTFKVTQKTRRRWFLDKLVDEIGVGYVSDSGSVSNYILSEIKPLHNFLTQLQPFLKLKQKQANLVLKIIEQLPSAKESPDKFLEVCTWVDQIAALNDSKTRKTTSETVRAVLDSLSEKKKSSPAAD

SEQ ID NO: 221 - protein, 167 aa, Artificial
  Table XVI variant 7
MANTKYNKEFLLYLAGFVDGDGSIIAQIEPNQSYKFKHRLKLTFKVTQKTQRRWFLDKLVDEIGVGYVSDSGSVSNYILSEIKPLHNFLTQLQPFLKLKQKQANLVLKIIEQLPSAKESPDKFLEVCTWVDQVAALNDSKTRKTTSETVRAVLDSLSEKKKSSPAAD

SEQ ID NO: 222 - protein, 167 aa, Artificial
  Table XVI variant 8
MADTKYNKEFLLYLAGFVDGDGSIIAQIEPNQSYKFKHRLKLTFKVTQKTQRRWFLDKLVDEIGVGYVSDSGSVSNYILSEIKPLHNFLTQLQPFLKLKQKQANLVLKIIEQLPSAKESPDKFLEVCTWVDQVAALNDSKTRKTTSETVRAVLDSLSEKKKSSTAAD

SEQ ID NO: 223 - protein, 167 aa, Artificial
  Table XVI variant 9
MANTKYNKEFLLYLAGFVDGDGSIIAQIEPNQSYKFKHRLKLTFQVTQKTQRRWFLDKLVDEIGVGYVSDSGSVSNYILSEIKPLHNFLTQLQPFLKLKQKQANLVLKIIEQLPSAKESPDKFLEVCTWVDQVAALNDSKTRKTTSETVRTVLDSLSEKKKSSPAAD

SEQ ID NO: 224 - protein, 167 aa, Artificial
  Table XVI variant 10
MANTKYNKEFLLYLAGFVDGDGSIIAQIEPNQSYKFKHRLKLTFKVTQKTQRRWFLDKLVDEIGVGYVSDSGSVSNYILSEIKPLHNFLTQLQPSLKLKQKQANLVLKIIEQLPSAKESPDKFLEVCTWVDQVAALNDSKTRKTTSETVRAVLDSLSEKKKSSPAAD

SEQ ID NO: 225 - protein, 167 aa, Artificial; identical to SEQ ID NO: 133
  Table XVI variant 11

SEQ ID NO: 226 - protein, 167 aa, Artificial
  Table XVI variant 12
MANTKYNKEFLLYLAGFVDGDGSIIAQIEPNQSYKFKHRLKLTFKVTQKTRRRWFLDKLVDEIGVGYVSDSGSVSNYILSEIKPLHNFLTQLQPSLKLKQKQANLVLKIIEQLPSAKESPDKFLEVCTWVDQVAALNDSKTRKTTSETVRTVLDSLSEKKKSSPAAD

SEQ ID NO: 227 - protein, 167 aa, Artificial
  Table XVI variant 13
MANTKYNKEFLLYLAGFVDGDGSIIAQIEPNQSYKFKHRLKLTFKVTQKTQRRWFLDKLVDEIGVGHVSDSGSVSNYILSEIKPLHNFLTQLQPSLKLKQKQANLVLKIIEQLPSAKESPDKFLEVCTWVDQVAALNDSKTRKTTSETVRTVLDSLSEKKKSSPAAD

SEQ ID NO: 228 - protein, 167 aa, Artificial
  Table XVI variant 14
MANTKYNKEFLLYLAGFVDGDGSIIAQIEPNQSYKFKHRLKLTFKVTQKTQRRWFLDKLVDEIGVGYVSDSGSVSNYTLSEIKPLHNFLTQLQPFLKLKQKQANLVLKIIEQLPSAKESPDKFLEVCTWVDQVAALNDSKTRKTTSETVRAVLDSLSEKKKSSPAAD

SEQ ID NO: 229 - protein, 167 aa, Artificial
  Table XVI variant 15
MANTKYNKEFLLYLAGFVDGDGSIIAQIEPNQSYKFKHRLKLTFQVTQKTQRRWILDKLVDEIGVGYVRDEGSVSNYTLSEIKPLHNFLTQLQPSLKLKQKQANLVLKIIEQLPSAKESPDKFLEVCTWVDQIAALNDSKTRKTTSETVRAVLDSLSEKKKSSPAAD

SEQ ID NO: 230 - protein, 167 aa, Artificial; identical to SEQ ID NO: 34
  Table XVI variant 16

SEQ ID NO: 231 - protein, 167 aa, Artificial
  Table XVI variant 17
MANTKYNKEFLLYLAGFVDGDGSIIAQIEPNQSYKFKHRLKLTFKVTQKTQRRWILDKLVDEIGVGYVRDSGSVSNYILSEIKPLHNFLTQLQPFLKLKQKQANLVLKIIEQLPSAKESPDKFLEVCTWVDQIAALNDSKTRKTTSETVRTVLDSLSEKKKSSPAAD

SEQ ID NO: 232 - protein, 167 aa, Artificial
  Table XVI variant 18
MANTKYNKEFLLYLAGFVDGDGSIIAQIEPNQSYKFKHRLKLTFKVTQKTQRRWLLDKLVDEIGVGYVRDEGSVSNYILSEIKPLHNFLTQLQPSLKLKQKQANLVLKIIEQLPSAKESPDKFLEVCTWVDQIAALNDSKTRKTTSETVRAVLDSLSEKKKSSPAAD

SEQ ID NO: 233 - protein, 167 aa, Artificial
  Table XVI variant 19
MANTKYNKEFLLYLAGFVDGDGSIIAQIEPNQSYKFKHRLKLTFKVTQKTQRRWLLDKLVDEIGVGYVRDEGSVSNYTLSEIKPLHNFLTQLQPFLKLKQKQANLVLKIIEQLPSAKESPDKFLEVCTWVDQIAALNDSKTRKTTSETVRAVLDSLSEKKKSSPAAD

SEQ ID NO: 234 - protein, 167 aa, Artificial
  Table XVII HSV2.4 variant 1
MANTKYNKEFLLYLAGFVDGDGSIIAQIEPNQSYKFKHRLKLTFKVTQKTQRRWFLDKLVDEIGVGYVSDSGSVSNYILSEIKPLHNFLTQLQPFLKLKQKQANLVLKIIEQLPSAKESPDKFLEVCTWVDQVAALNDSKTRKTTSETVRTVLDSLSEKKKSSPAAD

SEQ ID NO: 235 - protein, 167 aa, Artificial; identical to SEQ ID NO: 233
  Table XVII HSV2.4 variant 2

SEQ ID NO: 236 - protein, 167 aa, Artificial; identical to SEQ ID NO: 34
  Table XVII HSV2.4 variant 3

SEQ ID NO: 237 - protein, 167 aa, Artificial; identical to SEQ ID NO: 220
  Table XVII HSV2.4 variant 4

SEQ ID NO: 238 - protein, 167 aa, Artificial
  Table XVII HSV2.4 variant 5
MANTKYNKEFLLYLAGFADGDGSIIAQIEPNQSYKFKHRLKLTFKVTQKTQRRWFLDKLVDEIGVGYVRDEGSVSNYTLSEIKPLHNFLTQLQPFLKLKQKQANLVLKIIEQLPSAKESPDKFLEVCTWVDQIAALNDSKTRKTTSETVRTVLDSLSEKKKSSPAAD

SEQ ID NO: 239 - protein, 167 aa, Artificial
  Table XVII HSV2.4 variant 6
MANTKYNKEFLLYLAGFVDGDGSIIAQIEPNQSYKFKHRLKLTFKVTQKTQRRWILDKLVDEIGVGYVRDEGSVSNYTLSEIKPLHNFLTQLQPSLKLKQKQANLVLKIIEQLPSAKESPDKFLEVCTWVDQIAALNDSKTRKTTSETVRAVLDSLSEKKKSSPAAD

SEQ ID NO: 240 - protein, 167 aa, Artificial; identical to SEQ ID NO: 33
  Table XVII HSV2.3 variant 1

SEQ ID NO: 241 - protein, 167 aa, Artificial; identical to SEQ ID NO: 182
  Table XVII HSV2.3 variant 2

SEQ ID NO: 242 - protein, 167 aa, Artificial; identical to SEQ ID NO: 206
  Table XVII HSV2.3 variant 3

SEQ ID NO: 243 - protein, 167 aa, Artificial; identical to SEQ ID NO: 180
  Table XVII HSV2.3 variant 4

SEQ ID NO: 244 - protein, 167 aa, Artificial; identical to SEQ ID NO: 183
  Table XVII HSV2.3 variant 5

SEQ ID NO: 245 - protein, 167 aa, Artificial; identical to SEQ ID NO: 181
  Table XVII HSV2.3 variant 6

SEQ ID NO: 246 - protein, 167 aa, Artificial
  Table XVII HSV2.3 variant 7
MANTKYNKEFLLYLAGFVDGDGSIIAQIKPNQSYKFKHQLSLTFDVTQKTQRRWFLDKLVDEIGAGYVTDSGSVSRYRLSEIKPLHNFLTQLQPFLKLKQKQANLVLKIIEQLPSAKESPDKFLEVCTWVDQIAALNDSKTRKTTSETVRAVLDSLSEKKKSSPAAD

SEQ ID NO: 247 - DNA, 43 bp, Artificial
  AT1CA1F
aaaaagcaggctggcgcgcctacacagcggccttgccaccatg

SEQ ID NO: 248 - DNA, 36 bp, Artificial
  AT2CA2R
agaaagctgggtgctagcgctcgagttatcagtcgg

SEQ ID NO: 249 - protein, 167 aa, Artificial; identical to SEQ ID NO: 34
  Table XVIII HSV 2.6 Variant 1

SEQ ID NO: 250 - protein, 167 aa, Artificial; identical to SEQ ID NO: 218
  Table XVIII HSV 2.6 Variant 2

SEQ ID NO: 251 - protein, 167 aa, Artificial
  Table XVIII HSV 2.5 Variant 1
MANTKYNKEFLLYLAGFVDGDGSIIAQIKPNQSYKFKHQLSLTFDVTQKTQRRWFLDKLVDEIGVGYVTDSGSVSRYILSKIKPLHNFLTQLQPFLKLKQKQANLVLKIIEQLPSAKESPDKFLEVCTWVDQIAALNDSKTRKTTSETVRAVLDSLSEKKKSSPAAD

SEQ ID NO: 252 - protein, 167 aa, Artificial; identical to SEQ ID NO: 180
  Table XVIII HSV 2.5 Variant 2

SEQ ID NO: 253 - protein, 354 aa, Artificial
  SCOH-HSV2-M1-MC
MANTKYNEEFLLYLAGFVDGDGSIIAQIKPNQSYKFKHQLSLTFDVTQKTQRRWFLDKLVDEIGVGYVTDSGSVSRYRLSKIKPLHNFLTQLQPFLELKQKQANLVLKIIEQLPSAKESPDKFLEVCTWVDQIAALNDSKTRKTTSETVRAVLDSLSEKKKSSPAAGGSDKYNQALSKYNQALSKYNQALSGGGGSNKKFLLYLAGFVDSDGSIIAQIEPNQSYKFKHRLKLTFKVTQKTQRRWILDKLVDRIGVGYVRDSGSVSNYILSEIKPLHNFLTQLQPFLKLKQKQANLVLKIIEQLPSAKESPDKFLEVCTWVDQIAALNDSKTRKTTSETVRAVLDSLSEKKKSSP

SEQ ID NO: 254 - protein, 354 aa, Artificial
  SCOH-HSV2-M1-MC-132V
MANTKYNEEFLLYLAGFVDGDGSIIAQIKPNQSYKFKHQLSLTFDVTQKTQRRWFLDKLVDEIGVGYVTDSGSVSRYRLSKIKPLHNFLTQLQPFLELKQKQANLVLKIIEQLPSAKESPDKFLEVCTWVDQIAALNDSKTRKTTSETVRAVLDSLSEKKKSSPAAGGSDKYNQALSKYNQALSKYNQALSGGGGSNKKFLLYLAGFVDSDGSIIAQIEPNQSYKFKHRLKLTFKVTQKTQRRWILDKLVDRIGVGYVRDSGSVSNYILSEIKPLHNFLTQLQPFLKLKQKQANLVLKIIEQLPSAKESPDKFLEVCTWVDQVAALNDSKTRKTTSETVRAVLDSLSEKKKSSP

SEQ ID NO: 255 - protein, 354 aa, Artificial
  SCOH-HSV2-M1-MC-80K132V
MANTKYNEEFLLYLAGFVDGDGSIIAQIKPNQSYKFKHQLSLTFDVTQKTQRRWFLDKLVDEIGVGYVTDSGSVSRYRLSKIKPLHNFLTQLQPFLELKQKQANLVLKIIEQLPSAKESPDKFLEVCTWVDQIAALNDSKTRKTTSETVRAVLDSLSEKKKSSPAAGGSDKYNQALSKYNQALSKYNQALSGGGGSNKKFLLYLAGFVDSDGSIIAQIEPNQSYKFKHRLKLTFKVTQKTQRRWILDKLVDRIGVGYVRDSGSVSNYILSKIKPLHNFLTQLQPFLKLKQKQANLVLKIIEQLPSAKESPDKFLEVCTWVDQVAALNDSKTRKTTSETVRAVLDSLSEKKKSSP

SEQ ID NO: 256 - protein, 354 aa, Artificial
  SCOH-HSV2-M1-MC-80K105A132V
MANTKYNEEFLLYLAGFVDGDGSIIAQIKPNQSYKFKHQLSLTFDVTQKTQRRWFLDKLVDEIGVGYVTDSGSVSRYRLSKIKPLHNFLTQLQPFLELKQKQANLVLKIIEQLPSAKESPDKFLEVCTWVDQIAALNDSKTRKTTSETVRAVLDSLSEKKKSSPAAGGSDKYNQALSKYNQALSKYNQALSGGGGSNKKFLLYLAGFVDSDGSIIAQIEPNQSYKFKHRLKLTFKVTQKTQRRWILDKLVDRIGVGYVRDSGSVSNYILSKIKPLHNFLTQLQPFLKLKQKQANLALKIIEQLPSAKESPDKFLEVCTWVDQVAALNDSKTRKTTSETVRAVLDSLSEKKKSSP

SEQ ID NO: 257 - protein, 354 aa, Artificial
  SCOH-HSV2-M1-132V-MC
MANTKYNEEFLLYLAGFVDGDGSIIAQIKPNQSYKFKHQLSLTFDVTQKTQRRWFLDKLVDEIGVGYVTDSGSVSRYRLSKIKPLHNFLTQLQPFLELKQKQANLVLKIIEQLPSAKESPDKFLEVCTWVDQVAALNDSKTRKTTSETVRAVLDSLSEKKKSSPAAGGSDKYNQALSKYNQALSKYNQALSGGGGSNKKFLLYLAGFVDSDGSIIAQIEPNQSYKFKHRLKLTFKVTQKTQRRWILDKLVDRIGVGYVRDSGSVSNYILSEIKPLHNFLTQLQPFLKLKQKQANLVLKIIEQLPSAKESPDKFLEVCTWVDQIAALNDSKTRKTTSETVRAVLDSLSEKKKSSP

SEQ ID NO: 258 - protein, 354 aa, Artificial
  SCOH-HSV2-M1-132V-MC-80K105A
MANTKYNEEFLLYLAGFVDGDGSIIAQIKPNQSYKFKHQLSLTFDVTQKTQRRWFLDKLVDEIGVGYVTDSGSVSRYRLSKIKPLHNFLTQLQPFLELKQKQANLVLKIIEQLPSAKESPDKFLEVCTWVDQVAALNDSKTRKTTSETVRAVLDSLSEKKKSSPAAGGSDKYNQALSKYNQALSKYNQALSGGGGSNKKFLLYLAGFVDSDGSIIAQIEPNQSYKFKHRLKLTFKVTQKTQRRWILDKLVDRIGVGYVRDSGSVSNYILSKIKPLHNFLTQLQPFLKLKQKQANLALKIIEQLPSAKESPDKFLEVCTWVDQIAALNDSKTRKTTSETVRAVLDSLSEKKKSSP

SEQ ID NO: 259 - protein, 354 aa, Artificial
  SCOH-HSV2-M1-132V-MC-80K132V
MANTKYNEEFLLYLAGFVDGDGSIIAQIKPNQSYKFKHQLSLTFDVTQKTQRRWFLDKLVDEIGVGYVTDSGSVSRYRLSKIKPLHNFLTQLQPFLELKQKQANLVLKIIEQLPSAKESPDKFLEVCTWVDQVAALNDSKTRKTTSETVRAVLDSLSEKKKSSPAAGGSDKYNQALSKYNQALSKYNQALSGGGGSNKKFLLYLAGFVDSDGSIIAQIEPNQSYKFKHRLKLTFKVTQKTQRRWILDKLVDRIGVGYVRDSGSVSNYILSKIKPLHNFLTQLQPFLKLKQKQANLVLKIIEQLPSAKESPDKFLEVCTWVDQVAALNDSKTRKTTSETVRAVLDSLSEKKKSSP

SEQ ID NO: 260 - protein, 354 aa, Artificial
  SCOH-HSV2-M1-132V-MC-80K105A132V
MANTKYNEEFLLYLAGFVDGDGSIIAQIKPNQSYKFKHQLSLTFDVTQKTQRRWFLDKLVDEIGVGYVTDSGSVSRYRLSKIKPLHNFLTQLQPFLELKQKQANLVLKIIEQLPSAKESPDKFLEVCTWVDQVAALNDSKTRKTTSETVRAVLDSLSEKKKSSPAAGGSDKYNQALSKYNQALSKYNQALSGGGGSNKKFLLYLAGFVDSDGSIIAQIEPNQSYKFKHRLKLTFKVTQKTQRRWILDKLVDRIGVGYVRDSGSVSNYILSKIKPLHNFLTQLQPFLKLKQKQANLALKIIEQLPSAKESPDKFLEVCTWVDQVAALNDSKTRKTTSETVRAVLDSLSEKKKSSP

SEQ ID NO: 261 - protein, 354 aa, Artificial
  SCOH-HSV2-M1-105A132V-MC-132V
MANTKYNEEFLLYLAGFVDGDGSIIAQIKPNQSYKFKHQLSLTFDVTQKTQRRWFLDKLVDEIGVGYVTDSGSVSRYRLSKIKPLHNFLTQLQPFLELKQKQANLALKIIEQLPSAKESPDKFLEVCTWVDQVAALNDSKTRKTTSETVRAVLDSLSEKKKSSPAAGGSDKYNQALSKYNQALSKYNQALSGGGGSNKKFLLYLAGFVDSDGSIIAQIEPNQSYKFKHRLKLTFKVTQKTQRRWILDKLVDRIGVGYVRDSGSVSNYILSEIKPLHNFLTQLQPFLKLKQKQANLVLKIIEQLPSAKESPDKFLEVCTWVDQIAALNDSKTRKTTSETVRAVLDSLSEKKKSSP

SEQ ID NO: 262 - DNA, 51 bp, Artificial
  HSV4.3 OLIGO
tggcatacaagtttccaagctggtgtacaccagcttggcaatcgtctgtca

SEQ ID NO: 263 - DNA, 26 bp, Artificial
  Gal10F
gcaactttagtgctgacacatacagg

SEQ ID NO: 264 - DNA, 24 bp, Artificial
  Gal10R
acaaccttgattggagacttgacc

SEQ ID NO: 265 - DNA, 15 bp, Artificial
  assF
  misc_feature (4)..(6): n is a, c, g, or t
ctannnttgaccttt

SEQ ID NO: 266 - DNA, 15 bp, Artificial
  assR
  misc_feature (10)..(12): n is a, c, g, or t
aaaggtcaannntag

SEQ ID NO: 267 - protein, 167 aa, Artificial
  Table XXII variant 1
MANTKYNKEFLLYLAGFVDGDGSIIAQIKPNQSYKFKHQLSLTFMVTQKTQRRWFLDKLVDEIGVGYVRDAGSVSNYVLSEIKPLHNFLTQLQPFLKLKQKQANLVLKIIEQLPSAKESPDKFLEVCTWVDQVAALNDSKTRKTTSETVRAVLDSLSEKKKSSPAAD

SEQ ID NO: 268 - protein, 167 aa, Artificial
  Table XXII variant 2
MANTKYNKEFLLHLAGFVDGDGSIIAQIKPNQSYKFKHQLSLTFMVTQKTQRRWFLDKLVDEIGVGYVRDCGSVSNYILSEIKPLHNFLTQLQPFLKLKQKQANLVLKIIEQLPSAKESPDKFLEVCTWVDQIAALNDSKTRKTTSETVRAVLDSLSEKKKSSPAAD

SEQ ID NO: 269 - protein, 167 aa, Artificial
  Table XXII variant 3
MANTKYNKEFLLYLAGFVDGDGSIIAQISPNQSYKFKHQLKLTFMVTQKTQRRWFLDKLVDEIGVGYVRDNGSVSNYILSKIKPLHNFLTQLQPLLKLKQKQANLVLKIIEQLPSAKESPDKFLEVCTWVDQIAALNDSKTRKTTSETVRAVLDSLSEKKKSSPAAD

SEQ ID NO: 270 - protein, 167 aa, Artificial
  Table XXII variant 4
MANTKYNKEFLLYLAGFVDGDGSIIAQIKPNQSYKFKHQLSLTFLVTQKTQRRWFLDKLVDEIGVGYVRDNGSVSNYILSKIKPLHNFLTQLQPFLKLKQKQANLVLKIIEQLPSAKESPDKFLEVCTWVDQIAALNDSKTRKTTSETVRAVLDSLSEKKKSSPAAD

SEQ ID NO: 271 - protein, 167 aa, Artificial
  Table XXII variant 5
MANTKYNKEFLLYLAGFVDGDGSIIAQIKPGQSYKFKHQLSLTFIVTQKTQRRWFLDKLVDEIGVGYVRDKGSVSNYVLSEIKPLHNFLTQLQPFLKLKQKQANLVLKIIEQLPSAKESPDKFLEVCTWVDQVAALNDSKTRKTTSETVRAVLDSLSEKKKSSPAAD

SEQ ID NO: 272 - protein, 167 aa, Artificial
  Table XXII variant 6
MANTKYNKEFLLYLAGFVDGDGSIIAQIKPNQSYKFKHQLSLTFYVTQKTQRRWFLDKLVDEIGVGYVRDKGSVSDYILSEIKPLHNFLTQLQPFLKLKQKQANLVLKIIEQLPSAKESPDKFLEVCTWVDQIAALNDSKTRKTTSETVRAVLDSLSEKKKSSPAAD

SEQ ID NO: 273 - protein, 167 aa, Artificial
  Table XXII variant 7
MANTKYNKEFLLYLAGFVDGDGSIIAQISPNQSYKFKHQLKLTFLVTQKTQRRWFLDKLVDEIGVGYVRDNGSVSNYILSKIKPLHNFLTQLQPFLKLKQKQANLVLKIIEQLPSAKESPDKFLEVCTWVDQIAALNDSKTRKTTSETVRAVLDSLSEKKKSSPAAD

SEQ ID NO: 274 - DNA, 51 bp, Artificial
  HSV4.4 OLIGO
tggcatacaagtttccactatcaggtacctgatagtggcaatcgtctgtca

SEQ ID NO: 275 - protein, 167 aa, Artificial
  Table XXIV variant 1
MANTKYNKEFLLYLAGFVDGDGSIIAQIKPNQSRKFKHELSLTFNVTQKTQRRWFLDKLVDEIGVGYVHDSGSVSYYNLSKIKPLHNFLTQLQPFLKLKQKQANLVLKIIEQLPSAKESPDKFLEVCTWVDQIAALNDSKTRKTTSETVRAVLDSLSEKKKSSPAAD

SEQ ID NO: 276 - protein, 167 aa, Artificial
  Table XXIV variant 2
MANTKYNKEFLLYLAGFVDGDGSIIAQIKPNQTYKFKHSLSLTFTVTQKTQRRWFLDKLVDEIGVGYVYDSGSVSYYVLSKIKPLHNFLTQLQPFLKLKQKQANLVLKIIEQLPSAKESPDKFLEVCTWVDQIAALNDSKTRKTTSETVRAVLDSLSEKKKSSPAAD

SEQ ID NO: 277 - protein, 167 aa, Artificial
  Table XXIV variant 3
MANTKYNKEFLLYLAGFVDGDGSIIAQIKPNQTYKFKHWLSLTFAVTQKTQRRWFLDKLVDEIGVGYVRDSGSVSYYYLSEIKPLHNFLTQLQPFLKLKQKQANLVLKIIEQLPSAKESPDKFLEVCTWVDQIAALNDSKTRKTTSETVRAVLDSLSEKKKSSPAAD

SEQ ID NO: 278 - protein, 167 aa, Artificial
  Table XXIV variant 4
MANTKYNKEFLLYLAGFVDGDGSIIAQIKPNQTCKFKHQLSLTFAVTQKTQRRWFLDKLVDEIGVGYVYDSGSVSYYKLSEIKPLHNFLTQLQPFLKLKQKQANLVLKIIEQLPSAKESPDKFLEVCTWVDQIAALNDSKTRKTTSETVRAVLDSLSEKKKSSPAAD

SEQ ID NO: 279 - protein, 167 aa, Artificial
  Table XXIV variant 5
MANTKYNKEFLLYLAGFVDGDGSIIAQIKPNQTYKFKHSLSLTFAVTQKTQRRWFLDKLVDEIGVGYVYDSGSVSYYKLSEIKPLHNFLTQLQPFLKLKQKQANLVLKIIEQLPSAKESPDKFLEVCTWVDQIAALNDSKTRKTTSETVRAVLDSLSEKKKSSPAAD

SEQ ID NO: 280 - protein, 167 aa, Artificial
  Table XXIV variant 6
MANTKYNKEFLLYLAGFVDGDGSIIAQIKPRQDYKFKHQLSLTFAVTQKTQRRWFLDKLVDEIGVGYVCDSGSVSYYILSEIKPLHNFLTQLQPFLKLKQKQANLVLKIIEQLPSVKESPDKFLEVCTWVDQIAALNDSKTRKTTSETVRAVLDSLSEKKKSSPAAD

SEQ ID NO: 281 - protein, 167 aa, Artificial
  Table XXIV variant 7
MANTKYNKEFLLYLAGFVDGDGSIIAQIKPRQSYKFKHELSLTFAVTQKTQRRWFLDKLVDEIGVGYVYDSGSVSYYKLSEIKPLHNFLTQLQPFLKLKQKQANLVLKIIEQLPSAKESPDKFLEVCTWVDQIAALNDSKTRKTTSETVRAVLDSLSEKKKSSPAAD

SEQ ID NO: 282 - protein, 167 aa, Artificial
  Table XXIV variant 8
MANTKYNKEFLLYLAGFVDGDGSIIAQIKPNQEYKFKHYLSLTFNVTQKTQRRWFLDKLVDEIGVGYVYDSGSVSYYKLSEIKPLHNFLTQLQPFLKLKQKQANLVLKIIEQLPSAKESPDKFLEVCTWVDQIAALNDSKTRKTTSETVRAVLDSLSEKKKSSPAAD

SEQ ID NO: 283 - protein, 167 aa, Artificial
  Table XXIV variant 9
MANTKYNKEFLLYLAGFVDGDGSIIAQIKPNQAYKFKHYLSLTFAVTQKTQRRWFLDKLVDEIGVGYVYDSGSVSYYKLSEIKPLHNFLTQLQPFLKLKQKQANLVLKIIEQLPSAKESPDKFLEVCTWVDQIAALNDSKTRKTTSETVRAVLDSLSEKKKSSPAAD

SEQ ID NO: 284 - protein, 167 aa, Artificial
  Table XXIV variant 10
MANTKYNKEFLLYLAGFVDGDGSIIAQIKPRQDYKFKHQLSLTFAVTQKTQRRWFLDKLVDEIGVGYVYDSGSVSYYKLSEIKPLHNFLTQLQPFLKLKQKQANLVLKIIEQLPSAKESPDKFLEVCTWVDQIAALNDSKTRKTTSETVRAVLDSLSEKKKSSPAAD

SEQ ID NO: 285 - protein, 167 aa, Artificial
  Table XXIV variant 11
MANTKYNKEFLLYLAGFVDGDGSIIAQIKPNQEYKFKHYLSLTFAVTQKTQRRWFLDKLVDEIGVGYVYDSGSVSYYKLSEIKPLHNFLTQLQPFLKLKQKQANLVLKIIEQLPSAKESPDKFLEVCTWVDQIAALNDSKTRKTTSETVRAVLDSLSEKKKSSPAAD

SEQ ID NO: 286 - protein, 167 aa, Artificial
  Table XXIV variant 12
MANTKYNKEFLLYLAGFVDGDGSIIAQIKPNQSRKFKHELSLTFAVTQKTQRRWFLDKLVDEIGVGYVYDSGSVSYYKLSEIKPLHNFLTQLQPFLKLKQKQANLVLKIIEQLPSAKESPDKFLEVCTWVDQIAALNDSKTRKTTSETVRAVLDSLSEKKKSSPAAD

SEQ ID NO: 287 - protein, 167 aa, Artificial
  Table XXIV variant 13
MANTKYNKEFLLYLAGFVDGDGSIIAQIKPRQDYKFKHQLSLTFAVTQKTQRRWFLDKLVDEIGVGYVRDNGSVSNYILSEIKPLHNFLTQLQPFLKLKQKQANLVLKIIEQLPSAKESPDKFLEVCTWVDQIAALNDSKTRKTTSETVRAVLDSLSEKKKSSPAAD

SEQ ID NO: 288 - protein, 167 aa, Artificial
  Table XXIV variant 14
MANTKYNKEFLLYLAGFVDGDGSIIAQIKPNQDYKFKHYLSLTFAVTQKTQRRWFLDKLVDEIGVGYVYDSGSVSYYKLSEIKPLHNFLTQLQPFLKLKQKQANLVLKIIEQLPSAKESPDKFLEVCTWVDQIAALNDSKTRKTTSETVRAVLDSLSEKKKSSPAAD

SEQ ID NO: 289 - DNA, 51 bp, Artificial
  HSV4 OLIGO
tggcatacaagtttccaagctggtgtacctgatagtggcaatcgtctgtca

SEQ ID NO: 290 - protein, 167 aa, Artificial; identical to SEQ ID NO: 288
  Table XXV HSV 4.4 Variant 1

SEQ ID NO: 291 - protein, 167 aa, Artificial; identical to SEQ ID NO: 283
  Table XXV HSV 4.4 Variant 2

SEQ ID NO: 292 - protein, 167 aa, Artificial; identical to SEQ ID NO: 287
  Table XXV HSV 4.4 Variant 3

SEQ ID NO: 293 - protein, 167 aa, Artificial; identical to SEQ ID NO: 279
  Table XXV HSV 4.4 Variant 4

SEQ ID NO: 294 - protein, 167 aa, Artificial; identical to SEQ ID NO: 285
  Table XXV HSV 4.4 Variant 5

SEQ ID NO: 295 - protein, 167 aa, Artificial; identical to SEQ ID NO: 286
  Table XXV HSV 4.4 Variant 6

SEQ ID NO: 296 - protein, 167 aa, Artificial; identical to SEQ ID NO: 275
  Table XXV HSV 4.4 Variant 7

SEQ ID NO: 297 - protein, 167 aa, Artificial; identical to SEQ ID NO: 277
  Table XXV HSV 4.4 Variant 8

SEQ ID NO: 298 - protein, 167 aa, Artificial; identical to SEQ ID NO: 280
  Table XXV HSV 4.4 Variant 9

SEQ ID NO: 299 - protein, 167 aa, Artificial; identical to SEQ ID NO: 269
  Table XXV HSV 4.3 Variant 1

SEQ ID NO: 300 - protein, 167 aa, Artificial; identical to SEQ ID NO: 273
  Table XXV HSV 4.3 Variant 2

SEQ ID NO: 301 - protein, 167 aa, Artificial; identical to SEQ ID NO: 267
  Table XXV HSV 4.3 Variant 3

SEQ ID NO: 302 - protein, 167 aa, Artificial; identical to SEQ ID NO: 270
  Table XXV HSV 4.3 Variant 4

SEQ ID NO: 303 - protein, 167 aa, Artificial; identical to SEQ ID NO: 272
  Table XXV HSV 4.3 Variant 5

SEQ ID NO: 304 - protein, 167 aa, Artificial; identical to SEQ ID NO: 271
  Table XXV HSV 4.3 Variant 6

SEQ ID NO: 305 - protein, 167 aa, Artificial; identical to SEQ ID NO: 269
  Table XXVI variant 1

SEQ ID NO: 306 - protein, 167 aa, Artificial; identical to SEQ ID NO: 273
  Table XXVI variant 2

SEQ ID NO: 307 - protein, 167 aa, Artificial; identical to SEQ ID NO: 267
  Table XXVI variant 3

SEQ ID NO: 308 - protein, 167 aa, Artificial; identical to SEQ ID NO: 270
  Table XXVI variant 4

SEQ ID NO: 309 - protein, 167 aa, Artificial; identical to SEQ ID NO: 272
  Table XXVI variant 5

SEQ ID NO: 310 - protein, 167 aa, Artificial; identical to SEQ ID NO: 271
  Table XXVI variant 6

SEQ ID NO: 311 - protein, 167 aa, Artificial; identical to SEQ ID NO: 269
  Table XXVII variant 1

SEQ ID NO: 312 - protein, 167 aa, Artificial
  Table XXVII variant 2
MANTKYNKEFLLYLAGFVDGDGSIIAQISPNQSYKFKHQLKLTFMVTQKTQRRWFLAKLVDEIGVGYVRDNGSVSNYILSKIKPLHNFLTQLQPFLKLKQKQANLVLKIIEQLPSAKESPDKFLEVCTWVDQIAALNDSKTRKTTSETVRAVLDSLSEKKKSSPAAD

SEQ ID NO: 313 - protein, 167 aa, Artificial
  Table XXVII variant 3
MANTKYNKEFLLYLAGFVDGDGSIIAQIKPNQSYKFKHQLSLTFYVTQKTQRRWFLDKLVDEIGVGYVRDKGSVSNYILSKIKPLHNFLTQLQPFLKLKQKQANLVLKIIEQLPSAKESPDKFLEVCTWVDQVAALNDSKTRKTTSETVRAVLDSLSEKKKSSPAAD

SEQ ID NO: 314 - protein, 167 aa, Artificial
  Table XXVII variant 4
MANTKYNKEFLLYLAGFVDGDGSIIAQISPNQSYKFKHQLKLTFMVTQKTQRRWFLDKLVDEIGVGYVRDNGSVSNYILSRIKPLHNFLTQLQPLLKLKQKQANLVLKIIEQLPSAKESPDKFLEVCTWVDQIAALNDSKTRKTTSETVRAVLDSLSEKKKSSPAAD

SEQ ID NO: 315 - protein, 167 aa, Artificial
  Table XXVII variant 5
MANTKYNKEFLLYLAGFVDGDGSIIAQISPNQSYKFKHQLKLTFMVTQKTQRRWFLDKLVDEIGVGYVRDNGSVSNYILSKIKPLHNFLTQLQPLLKLKQKQANLVLKIIEQLPSAKESPDKFLEVCTWVDQVAALNDSKTRKTTSETVRAVLDSLSEKKKSSPAAD

SEQ ID NO: 316 - protein, 167 aa, Artificial
  Table XXVII variant 6
MANTNYNKEFLLYLAGFVDGDGSIIAQIKPGQSYKFKHQLSLTFMVTQKTQRRWFLDKLVDEIGVGYVRDAGSVSNYVLSEIKPLHNFLTQLQPFLKLKQKQANLVLKIIEQLPSAKESPDKFLEVCTWVDQVAALNDSKTRKTTSETVRAVLDSQSEKKKSSPAAD

SEQ ID NO: 317 - protein, 167 aa, Artificial
  Table XXVII variant 7
MANTKYNKEFLLYLAGFVDGDGSIIAQIKPNQSYKFKHQLSLTFMVTQKTQRRWFLDKLVDEIGVGYVRDNGSVSNYILSKIRPLHNFLTQLQPFLKLKQKQANLVLKIIEQLPSAKESPDKFLEVCTWVDQIAALNDSKTRKTTSETVRAVLDSLSEKKKSSSAAD

SEQ ID NO: 318 - protein, 167 aa, Artificial
  Table XXVII variant 8
MANTKYNKEFLLYLAGFVDGDGSIIAQIKPNQSYKFKHQLSLTFMVTQKTQRRWFLDKLVDEIGVGYVRDAGSVSNYILSKIKPLHNFLTQLQPFLKLKQRQANLVLKIIEQLPSAKESPDKFLEVCTWVDQIAALNDSKTRKTTSETVRAVLDSLSEKKKSSPAAD

SEQ ID NO: 319 - protein, 167 aa, Artificial
  Table XXVII variant 9
MANTKYNKEFLLYLAGFVDGDGSIIAQISPNQSYKFKHQLKLTFLVTQKTQRRWFLDKLVDEIGVGYVRDNGSVSNYILSRIKPLHNFLTQLQPFLKLKQKQANLVLKIIEQLPSAKESPDKFLEVCTWVDQVAALNDSKTRKTTSETVRAVLDSLSEKKKSSPAAD

SEQ ID NO: 320 - protein, 167 aa, Artificial
  Table XXVII variant 10
MANTKYNKEFLLYLAGFVDGDGSIIAQIKPNQSYKFKHQLSLTFYVTQKTQRRWFLDKLVDEIGVGYVRDKGSVSDYILSEIKPLHNFLTQLQPFLKLKQKQANLVLKIIEQLPSAKESPDKFLEVCTWVDQVAALNDSKTRKTTSETVRAVLDSLSEKKKSSPAAD

SEQ ID NO: 321 - protein, 167 aa, Artificial; identical to SEQ ID NO: 269
  Table XXVII variant 11

SEQ ID NO: 322 - protein, 167 aa, Artificial
  Table XXVII variant 12
MANTKYNKEFLLYLAGFVDGDGSIIAQISPNRSYKFKHQLKLTFMVTQKTQRRWFLDKLVDEIGVGYVRDNGSVSNYILCKIKPLHNFLTQLQPFLKLKQKQANLVLKIIEQLPSAKESPDKFLEVCTRVDQIAALNDSKTRKTTSETVRAVLDSLSEKKKSSPAAD

SEQ ID NO: 323 - protein, 167 aa, Artificial
  Table XXVII variant 13
MANTKYNKEFLLYLAGFVDGDGSIIAQIKPNQSYKFKHQLSLTFYVTQKTQRRWFLDKLVDEIGVGYVRDKGSVSDYILSKIKPLHNFLTQLQPFLKLKQKQANLVLKIIEQLPSAKESPDKFLEVCTWVDQIAALNDSKTRKTTSETVRAVLDSLSDKKKSSPAAD

SEQ ID NO: 324 - protein, 167 aa, Artificial
  Table XXVII variant 14
MANPKYNKEFLLYLAGFVDGDGSIIAQIKPNQSYKFKHQLSLTFMVTQKTQRRWFLDKLVDEIGVGYVHENGSVSNYILSKIKPLHNFLTQLQPFLKLKQKQANLVLKIIEQLPSAKESPDKFLEVCTWVDQIAALNDSKTRKTTSETVRAVLDSLSEKKKSSPAAD

SEQ ID NO: 325 - protein, 167 aa, Artificial
  Table XXVII variant 15
MANTKYNKEFLLYLAGFVDGDGSIIAQISPNQSYKFKHQLKLTFLVTQKTQRRWFLDKLVDEIGVGYVRDNGSVSNYILSKIKPLHDFLTQLQPFLKLKQKQANLVLKIIEQLPSAKESPDKFLEVCTWVDQVAALNDSKTRKTTSETVRAVLDSLSEKKKSSPAAD

SEQ ID NO: 326 - protein, 167 aa, Artificial
  Table XXVII variant 16
MANTKYNKEFLLYLAGFVDGDGSIIAQISPNQSYKFKHQLKLTFMVTQKTQRRWFLDKLVDEIGVGYVRDNGSVSNYILSKIKPLHNFLTQLQPFLKLKQKQANLVLKIIEQLPSAKESPDKFLEVCTWVDQIAALNDSKTRKTTSETVRAVLDSLSEKKKSSPAAD

SEQ ID NO: 327 - protein, 167 aa, Artificial
  Table XXVII variant 17
MANTKYNKEFLLYLAGFVDGDGSIIAQIKPNQSYKFKHQLSLTFYVTQKTQRRWFLDKLVDEIGVGYVRDKGSVSDYILSKIKPLHNFLTQLQPFLKLKQKQANLVLKIIEQLPSAKESPDKFLEVCTWVDQIAALNDSKTRKTTSETVRAVLDSLSEKKKSSPAAD

SEQ ID NO: 328 - protein, 167 aa, Artificial
  Table XXVII variant 18
MANTKYNKEFLLYLAGFVDGDGSIIAQIKPNQSYKFKHQLSLTFMVTQKTQRRWLLDKLVDEIGVGYVRDAGSVSNYVLSEIKPLHNFLTQLQPFLKLKQKQANLVLKIIEQLPSAKESPDKFLEVCTWVDQVAALNDSKTRKTTSETVRAVLDSLSEKKKSSPAAD

SEQ ID NO: 329 - protein, 167 aa, Artificial
  Table XXVII variant 19
MANTKYNKEFLLYLAGFVDGDGSIIAQISPNQSYKFKHQLKLTFMVTQKTQRRWFLDKLVDEIGVGYVRDNGSVSDYILSKIKPLHNFLTQLQPFLKLKQKQANLVLKTIEQLPSAKESPDKFLEVCTWVDQVAALNDSKTRKTTSETVRAVLDGLSEKKKSSPAAD

SEQ ID NO: 330 - protein, 167 aa, Artificial
  Table XXVII variant 20
MANTKYNKEFLLYLAGFVDGDGSIIAQISPNQSYKFKHQLKLTFLVTQKTQRRWFLDKLVDEIGVGYVRDNGSVSNYILSKIKPLHNFLTQLQPFLKLKQKQANLDLKIIEQLPSAKESPDKFLEVCTWVDQVAALNDSKTRKTTSETVRAVLDSLSEKKKSSPAAD

SEQ ID NO: 331 - protein, 167 aa, Artificial
  Table XXVII variant 21
MANTKYNKEFLLYLAGFVDGDGSIIAQISPNQSYKFKHQLKLTLLVTQKTQRRWFLDKLVDEIGVGYVRDNGSVSNYILSKIKPLHNFLTQLQPFLKLKQKQANLVLKIIEQLPSAKESPDKFLEVCTWVDQVAALNDSKTRKTTSETVRAVLDSLSEKKKSSPAAD

SEQ ID NO: 332 - protein, 167 aa, Artificial
  Table XXVII variant 22
MANTKYNKEFLLYLAGFVDGDGSIIAQIKPNQSYKFKHQLSLTFMVTQKTQRRWFLVKLVDEIGVGYVRDNGSVSNYILSKIKPLHNFLTQLQPFLKLKQKQANLVLKIIEQLPSAKESPDKFLEVCTWVDQIAALNDSKTRKTTSETVRAALDSLSEKKKSSPAAD

SEQ ID NO: 333 - protein, 167 aa, Artificial
  Table XXVII variant 23
MANTKYNKEFLLYLAGFVDGDGSIIAQIKPGQSYKFKHQLSLTFMVTQKTQRRWFLDKLVDEIGVGYVRDAGSVSNYVLSEIKPLHNFLTQLQPFLKLKQKQANLVLKIIEQLPSAKESPDKFLEVCTWVDQVAALNDSKTRKTTSETVRAVLDSLGEKKKSSPAAD

SEQ ID NO: 334 - protein, 167 aa, Artificial
  Table XXVII variant 24
MANTKYNKEFLLYLAGFVDGDGSIIAQISPNQSYKFKHQLKLTFLVTQKTQRRWFLDKLVDEIGVGYVRDNGSVSNYTLSKIKPLHNFLTQLQPFLKLKQKQANLVLKIIEQLPSAKESPDKFLEVCTWVDQIAALNDSKTRKTTSETVRAVLDSLSEKKKSSPAAD

SEQ ID NO: 335 - protein, 167 aa, Artificial
  Table XXVII variant 25
MANTKYNKEFLLYLAGFVDGDGSIIAQIKPGQSYKFKHQLSLTFMVTQKTQRRWFLDKLVDEIGVGYVRDAGSVSNYVLSEIKPLHNFLTQLQPFLKLKQKQANLVLKIIEQLPSAKESPDKFLEVCTWVDQVAALNDSKTRKTTSETVRAVLDSLSEKKKSSPAAD

SEQ ID NO: 336 - protein, 167 aa, Artificial
  Table XXVII variant 26
MANTKYNKEFLLYLAGFVDGDGSIIAQIKPNQSYKFKHQLSLTFMVTQKTQRRWFLDKLVDEIGVGYVRDAGSVSNYILSKIKPLHNFLTQLQPFLKLKQKQANLVLKIIEQLPSAKESPDKFLEVCTWVDQVAALNDSKTRKTTSKTVRAVLDSLGEKKKSSPAAD

SEQ ID NO: 337 - protein, 167 aa, Artificial
  Table XXVII variant 27
MANTKYNKEFLLYLAGFVDGDGSIIAQISPNQSYKFKHQLKLTFMVTQKTQRRWFLDKLVDEIGVGYVRDKGSVSNYVLSEIKPLHNFLTQLQPFLKLKQKQANLVLKIIEQLPSAKESPDKFLEVCTWVDQVAALNDSKTRKTTSETVRAVLDSLSEKKKSSPAAD

SEQ ID NO: 338 - protein, 167 aa, Artificial
  Table XXVII variant 28
MANTKYNKEFLLYLAGFVDGDGSIIAQIKPNQSYKFKHQLSLTFMVTQKTQRRWFLDKLVDEIGVGYVRDAGSVSNYILSKIKPLHNFLTQLQPFLKLKQKQANLVLKIIEQLPSAKVSPDKFLEVCTWVDQIAALNDSKTRKTTSETVRAVLDSLSEKKKSSPAAD

SEQ ID NO: 339 - protein, 167 aa, Artificial
  Table XXVII variant 29
MANTKYNKEFLLYLAGFVDGDGSIIAQIKPGQSYKFKHQLSLTFIVTQKTQRRWFLDKLVDEIGVGYVRDKGSVSDYILSEIKPLHNFLTQLQPFLKLKQKQANLVLKIIEQLPSAKESPDKFLEVCTWVDQIAALNDSKTRKTTSETVRAVLDSLSEKKESSPAAD

SEQ ID NO: 340 - protein, 167 aa, Artificial
  Table XXVII variant 30
MANTKYNKEFLLYLAGFVDGDGSIIAQISPNQSYKFKHQLKLTFLVTQKTQRRWFLDKLVDEIGVGYVRDNGSVSNYILSKIKPLHNFLTQLQPFLKLKQKQANLVLKIIEQLPSAKESPDKFLEVCTWVDQVAALNDSKTRKTTSETVRAVLDSLSEKKKSSPAAD

SEQ ID NO: 341 - protein, 167 aa, Artificial
  Table XXVII variant 31
MANTKYNREFLLYLAGFVDGDGSIIAQISPNQSYKFKHQLKLTFLVTQKTQRRWFLDKLVDEIGVGYVRDNGSVSNYILTKIKPLHNFLTQLQPFLKLKQKQVNLVLKIIEQLPSAKESPDKFLEVCTWVDQIAALNDSKTRKTTSETVRAVLDSLSEKKKSSPAAD

SEQ ID NO: 342 - protein, 167 aa, Artificial
  Table XXVII variant 32
MANTKYNKEFLLYLAGFVDGDGSIIAQISPNQSYKFKHQLKLTFLVTQKTQRRWVLDKLVDEIGVGYVRDNGSVSNYILSKIKPLHNFLTQLQPFLKLKQKQANLVLKIIEQLPSAKESPDKFLEVCTWVDQIAALNDSKTRKTTSETVRAVLDSLSEKKKSSPAAD

SEQ ID NO: 343 - protein, 167 aa, Artificial
  Table XXVII variant 33
MANTKYNKEFLLYLAGFVDGDGSIIAQIKPNQSYKFKHQLSLTFMVTQKTQRRWFLDKLVDEIGVGYVRDNGSVSNYILSKIKPLHNFLTQLQPFLKLKQKQANLVLKIIEQLPSAKESPDKFLEVCTWVDQIAALNDSKTRKTTSETVRAVLDSLSEKKKSSPAAD

SEQ ID NO: 344 - protein, 167 aa, Artificial
  Table XXVII variant 34
MANTKYNKEFLLYLAGFVDGDGSIIAQISPNQSYKFKHQLKLTFMVTQKTQRRWFLDKLVDEIGVGYVRDNESVSNYMLSRIKPLHNFLTQLQPFLKLKQKQANLALKIIEQLPSAKESPDKFLEVCTWVDQIAALNDSKTRKTTSETVRAVLDSLSEKKKSSPAAD

SEQ ID NO: 345 - protein, 167 aa, Artificial
  Table XXVII variant 35
MANTKYNEEFLLYLAGFVDGDGSIIAQIKPNQSYKFKHQLSLTFMVTQKTQRRWFLDKLVDEIGVGYVRDKGSVSNYVLSEIKPLHNFLTQLQPFLKLKQKQANLVLKIIEQLPSAKESPDKFLEVCTWVDQVAALNDSKTRKTTSETVRAVLDSLSEKKKSSPAAD

SEQ ID NO: 346 - protein, 167 aa, Artificial
  Table XXVII variant 36
MANTKYNKEFLLYLAGFVDGDGSIIAQISPNQSYKFKHQLKLTFMVTQKTQRRWFLDKLVDEIGVGYVRDNGSVSNYILSKIKPLHNFLTQLQPFLKLKQKQANLVLKIIEQLPSARESPDKFLEVCTWVDQIAALNDSKTRKTTSETVRAVLDSLSEKKKSSPAAD

SEQ ID NO: 347 - protein, 167 aa, Artificial
  Table XXVII variant 37
MAYTKYNKEFLLYLAGFVDGDGSIIAQIKPNQSYKFKHQLSLTFMVTQKTQRRWFLDKLVDEIGVGYVRDKGSVSDYILSEIKPLHNFLTQLQPFLKLKQKQANLVLKIIEQLPSAKESPDKFLEVCTWVDQVAALNDSKTRKTTSETVRAVLDSLSEKKKSSPAAD

SEQ ID NO: 348 - protein, 167 aa, Artificial
  Table XXVII variant 38
MANTKYNKEFLLYLAGFVDGDGSIIAQIKPNQSYKFKHQLSLTFYVTQKTQRRWFLDKLVDEIGVGYVRDKGSVSDYILCEIKPLHNFLTQLQPFLKLKQKQANLVLKIIEQLPSAKESPAKFLEVCTWVDQVAALNDSKTRKTTSETVRAVVDSLSEKKKSSPAAD

SEQ ID NO: 349 - protein, 167 aa, Artificial
  Table XXVII variant 39
MANTKYNKEFLLYLAGFVDGDGSIIAQISPNQSYKFKHQLKLTFLVTQKTRRRWFLDKLVDEIGVGYVRDNGSVSNYILSKIKPLHNFLTQLQPFLKLKQKQANLVLKIIEQLPSAKESPDKFLEVCTWVDQIAALNDSKTRKTTSETVRAVLDSLSEKKKSSPAAD

SEQ ID NO: 350 - protein, 167 aa, Artificial; identical to SEQ ID NO: 288
  Table XXVIII variant 1

SEQ ID NO: 351 - protein, 167 aa, Artificial
  Table XXVIII variant 2
MANTKYNKEFLLYLAGFVDGDGSIIAQIKPNQSRKFKHELSLTFNVTQKTQRRWFLDKLVDEIGVGYVYDSGSVSSYKLSEIKPLHNFLTQLQPFLKLKQKQANLVLKIIEQLPSAKESPDKFLEVCTWVDQIAALNDSKTRKTTSETVRAVLDSLSEKKKSSPAAD

SEQ ID NO: 352 - protein, 167 aa, Artificial; identical to SEQ ID NO: 287
  Table XXVIII variant 3

SEQ ID NO: 353 - protein, 167 aa, Artificial; identical to SEQ ID NO: 279
  Table XXVIII variant 4

SEQ ID NO: 354 - protein, 167 aa, Artificial; identical to SEQ ID NO: 285
  Table XXVIII variant 5

SEQ ID NO: 355 - protein, 167 aa, Artificial; identical to SEQ ID NO: 275
  Table XXVIII variant 6

SEQ ID NO: 356 - protein, 167 aa, Artificial; identical to SEQ ID NO: 277
  Table XXVIII variant 7

SEQ ID NO: 357 - protein, 167 aa, Artificial; identical to SEQ ID NO: 280
  Table XXVIII variant 8

SEQ ID NO: 358 - protein, 167 aa, Artificial; identical to SEQ ID NO: 286
  Table XXVIII variant 9

SEQ ID NO: 359 - protein, 167 aa, Artificial
  Table XXIX variant 1
MANTKYNKEFLLYLAGFVDGDGSIIAQIKPNQEYKFKHYLSLTFAVTQKTQRRWFLDKLVDEIGVGYVYDSGSVSYYKLSEIKPLHNFLTQLQPFLKLKQKQANLALKIIEQLPSAKESPDKFLEVCTWVDQIAALNDSKTRKTTSETVRAVLDSLSEKKKSSPAAD

SEQ ID NO: 360 - protein, 167 aa, Artificial
  Table XXIX variant 2
MANTKYNKEFLLYLAGFVDGDGSIFAQIKPNQEYKFKHYLSLTFAVTQKTQRRWFLDKLVDEIGVGYVYDSGSVSYYKLSEIKPLHNFLTQLQPFLKLKQKQANLVLRIIEQLPSAKESPDKFLEVCTWVDQIAALNDSKTRKTTSETVRAVLDSLSEKKKSSPAAD

SEQ ID NO: 361 - protein, 167 aa, Artificial
  Table XXIX variant 3
MANTKYNKEFLLYLAGFVDGDGSIIAQIKPNQEYKFKHYLSLTFAVTQKTQRRWFLDKLVDEIGVGYVYDSGSVSYYKLSEIKPLHNFLTQLQPFLKLKQKQANLVLKIIEQLPSAKESPDKFLEVCTWVDQVAALNDSKTRKTTSETVRAVLDSLSEKKKSSPAAD

SEQ ID NO: 362 - protein, 167 aa, Artificial; identical to SEQ ID NO: 288
  Table XXIX variant 4

SEQ ID NO: 363 - protein, 167 aa, Artificial
  Table XXIX variant 5
MANTKYNKEFLLYLAGFVDGDGSIIAQIKPNQEYKFKHYLSLTFAVTQKTQRRWFLDKLVDEIGVGYVYDSGSVSYYKLSEIKPLHNFLTQLQPFLKLKQKQANLVLKIIEQLPYAKESPDKFLEVCTWVDQIAALNDSKTRKTTSETVRAVLDSLSEKKKSSPAAD

SEQ ID NO: 364 - protein, 167 aa, Artificial
  Table XXIX variant 6
VANTKYNKEFLLYLAGFVDGDGSIIAQIKPNQGYKFKHYLSLTFAVTQKTQRRWFLDKLVDEIGVGYVYDSGSVSYYKLSKIKPLHNFLTQLQPFLKLKQKQASLVLKIIEQLPSAKESPDKFLEVCTWVDQIAALNDSKTRKTTSETVRAVLDSLSEKKKSSPAAD

SEQ ID NO: 365 - protein, 167 aa, Artificial; identical to SEQ ID NO: 36
  Table XXIX variant 7

SEQ ID NO: 366 - protein, 167 aa, Artificial
  Table XXIX variant 8
MANTKYNKEFLLYLAGFVDGDGSIIAQIKPNQEYKFKHYLSLTFAVTQKTRRRWFLDKLVDEIGVGYVYDSGSVSYYKLSEIKPLHNFLTQLQPFLKLKQKQANLVLKIIEQLPSAKESPDKFLEVCTWVDQIAALNDSKTRKTTSETVRAVLDSLSEKKESSPAAD

SEQ ID NO: 367 - protein, 167 aa, Artificial; identical to SEQ ID NO: 285
  Table XXIX variant 9

SEQ ID NO: 368 - protein, 167 aa, Artificial
  Table XXIX variant 10
MANTKYNKEFLLYLAGFVDGDGSIIAQIKPNQSRKFKHELSLTFAVTQKTQRRWLLDKLVDEIGVGYVYDSGSVSYYKLSEIKPLHNFLTQLQPFLKLKQKQAILVLKIIEQLPSAKESPDKFLEVCTWVDQIAALNDSKTRKTTSETVRAVLDSLSEKKKSSPAAD

SEQ ID NO: 369 - protein, 167 aa, Artificial
  Table XXIX variant 11
MANTKYNKEFLLYLAGFVDGDGSIIAQIKPNQTYKFKHSLSLTFAVTQKTQRRWFLDKLVDEIGVGYVYDSGSVSYYKLSEIKPLHNFLTQLQPFLKLKQKQANLVLKIIEQLPSAKESPDKFLQVCTWVDQVAALNDSKTRKTTSETVRAVLDSLSEKKKSSPAAD

SEQ ID NO: 370 - protein, 167 aa, Artificial
  Table XXIX variant 12
MANTKYNKEFLLYLAGFVDGDGSIIAQIKPNQRYKFKHELSLTFAVTQKTQRRWFLDKLVDEIGVGYVYDSGSVSYYKLSEIKPLHNFLTQLQPFLKLKQKQANLVLKIIEQLPSAKESPDKFLEVCTWADQIAALNDSKTRKTTSETVRAVLDSLSEKKKSSPAAD

SEQ ID NO: 371 - protein, 167 aa, Artificial
  Table XXIX variant 13
MANTKYSKEFLLYLAGFVDGDGSIIAQIKPNQEYKFKHYLSLTFAVTQKTQRRWFLDKLVDEIGVGYVYDSGSVSYYKLSEIKPLHNFLTQLQPFLKLKQKQANLVLKIIERLPSAKESPDKFLEVCTWVDQIAALNDSKTRKTTSETVRAVLDSLSEKKKSSPAAD

SEQ ID NO: 372 - protein, 167 aa, Artificial
  Table XXIX variant 14
MANTKYNKEFLLYLAGFVDGDGSIIAQIKPNQDYKFKHYLSLTFAVTQKTQRRWFLDKLVDEIGVGYVYDSGSVSYYNLSKIKPLHNFLTQLQPFLKLKQKQANLVLKIIEQLPSAKESPDKFLEVCTWVDQVAALNDSKTRKTTSETVRAVLDSLSEKKKSSPAAD

SEQ ID NO: 373 - protein, 167 aa, Artificial
  Table XXIX variant 15
MANTKYNKEFLLYLAGFVDGDGSIIAQIKPNQDYKFKHYLSLTFAVTQKTQRRWFLDKLVDEIGVGYVYDSGSVSYYKLSEIKPLHNFLTQLQPFLKLKQKQANLVLKIIEQLPSAKESPDKFLEVCTWVDQIAALNDSKTRKTTSETVRAVLDSLSEKKKSSPTAD

SEQ ID NO: 374 - protein, 167 aa, Artificial
  Table XXIX variant 16
MANTKYNKEFLLYLAGFVDGDGSIIAQIKPNQEYKFKHYLSLTFAVTQKTQRRWFLDKLVDEIGVGYVYDSGSVSYYKLSEIKPLHNFLTQLQPFLKLKQKQANLVLKIIEQLPSAKESPDKFLEVCTWVDQIAALNDSKTRKTTSETVRAVLDSLSEKKKSSRAAD

SEQ ID NO: 375 - protein, 167 aa, Artificial
  Table XXIX variant 17
MANTKYNKEFLLYLAGFVDGDGSIIAQIKPNQDYKFKHYLSLTFAVTQKTQRRWFLDKLVDEIGVGYVYDSGSVSYYKLSEIMPLHNFLTQLQPFLKLKQKQANLVLKIIDQLPSAKGSPDKFLEVCTWVDQVAALNDSKTRKTTSETVRAVLDSLSEKKKSSQAAD

SEQ ID NO: 376 - protein, 167 aa, Artificial
  Table XXIX variant 18
MANTKYNKEFLLYLAGFVDGDGSIIAQIKPNQEYKFKHYLSLTFAVTQKTQRRWFLDKLVDEIGVGYVYDSGSVSYYKLSEIKPLHNFLTQLQPFLKLKQKQANLVLKIIEQLPSAKESPDKFLEVCTWVDQIAALNDSKTRKTTSETVRAVLDSLSEKKKSPPAAD

SEQ ID NO: 377 - protein, 167 aa, Artificial
  Table XXIX variant 19
MANTKYNKEFLLYLAGFVDGDGSIIAQIKPNQTYKFNHYLSLTFAVTQKTQRRWFLDKLVGEIGVGYVSDSGSVSYYKLSEIKPLHNFLTQLQPFLKLKQKQANLVLEIIKQLPSAKESPDKFLEVCTWVDQVAALNDSKTRKTTSETVRAVLDSLSEKKKSSPAAD

SEQ ID NO: 378 - protein, 167 aa, Artificial
  Table XXIX variant 20
MANTKYNKEFLLYLAGFVDGDGSIIAQIKPNQEYKFKHYLSLTFAVTQKTQRRWFLDKLVDEIGVGYVYDSGSVSYYKLSEIKPLHNFLTQLQPFLKLKQKQANLVLKIIEQLPSAKESPDKFLEVCTWVDQIAALNDSKTRKTTSETVRAVLDSLSEKKNSSPAAD

SEQ ID NO: 379 - protein, 167 aa, Artificial
  Table XXIX variant 21
MANTKYNKEFLLYLAGFVDGDGSIIAQIKPNQEYKFKHYLSLTFAVTQKTQRRWFLDKLVDEIGVGYVYDSGSVSYYKLSEIKPLHNFLTQLQPFLKLKQKQANLVLKIIEQLPSAKESPDKFLEVCTWVDQIAALNDSKTRKTTSETVRAVLDSLSEKKKSSQAAD

SEQ ID NO: 380 - protein, 167 aa, Artificial
  Table XXIX variant 22
MANTKYNKEFLLYLAGFVDGDGSIIAQIKPNQEYKFKHYLSLTLAVTQKTQRRWFLDKLVDEIGVGYVYDSGSVSYYKLSEIKPLHNFLTQLQPFLKLKQKQANLVLKIIEQLPSAKESPDKFLEVCTWVDQIAALNDSKTRKTTSETVRAVLDSLSEKKKSSPAAD

SEQ ID NO: 381 - protein, 167 aa, Artificial
  Table XXIX variant 23
MANTKYNKEFLLYLAGFVDGDGSIIAQIKPNQEYKFKHYLSLTFAVTQKTQRRWFLDKLVDEIGVGYVYDSGSVSYYKLSEIKPLHNFLTQLQPFLKLKQKQANLVLRIIEQLPSAKESPDKFLEVCTWVDQIAALNDSKTRKTTSETVRAVLDSLSEKKKSSPAAD

SEQ ID NO: 382 - protein, 167 aa, Artificial
  Table XXIX variant 24
MANTKYNKEFLLYLAGFVDGDGSIIAQIKPNQEYKFKHYLSLTFAVTQKTQRRWFLDKLVDEIGVGYVYDSGSVSYYKLSEIKPLHNFLTQLQPFLKLKQKQANLVLKIIEQLPSAKESPDKFLEVCTWVDQIAALNDSKTRKTTSETVRAALDSLSEKKKSSPAAD

SEQ ID NO: 383 - protein, 167 aa, Artificial
  Table XXIX variant 25
MASTKYNKEFLLYLAGFVDGDGSIIAQIKPNQDYKFKHYLSLTFAVTQKTQRRWFLDKLVDEIGVGYVYDSGSVSYYKLSEIKPLHNFLTQLQPFLKLKQKQANLVLKIIEQLPSAKESPDKFLEVCTWVDQIAALNDSKTRKTTSETVRAVLDSLSEKKKSSPAAD

SEQ ID NO: 384 - protein, 167 aa, Artificial
  Table XXIX variant 26
MANTKYNKEFLLYLAGFVDGDGSIIAQIKPNQDYKFKHYLSLTFAVTQKTQRRWFLDKLVDEIGVGHVYDSGSVSYYKLSEIKPLHNFLTQLQPFLKLKQKQANLVLKIIEQLPSAKESPDKFLEVCTWVDQIAALNDSKTRKTTSETVRAVQDSLSEEKKSSPAAD

SEQ ID NO: 385 - protein, 167 aa, Artificial
  Table XXIX variant 27
MANTKYSKEFLLYLAGFVDGDGSIIAQIKPNQDYKFKHYLSLTFAVTQKTQRRWFLDKLVDEIGVGYVYDSGSVSYYKLSEIKPLHNFLTQLQPFLKLKQKQANLVLKIIEQLPSAKESPDKFLEVCTWVDQIAALNDSKTRKTTSETVRAVLDSLSEKKKSSPAAD

SEQ ID NO: 386 - protein, 167 aa, Artificial
  Table XXIX variant 28
MANTKYNKEFLLYLAGFVDGDGSIIAQIKPNQDYKFKHYLSLTFAVTQKTQRRWFLDKLVDEIGVGYVYDSGSVSYYKISEIKPLHNFLTQLQPFLKLKQKQANLVLKIIEQLPSAKESPDKFLEVCTWVDQIAALNDSKTRKTTSETVRAVLDSLSEKKKSSPAAD

SEQ ID NO: 387 - protein, 167 aa, Artificial
  Table XXIX variant 29
MANTKYNKEFLLYLAGFVDGDGSIIAQIKPNQSRKFKHYLSLTFAVTQKTQRRWFLDKLVDEIGVGYVYDSGSVSYYKLSEIKPLHNFLTQLQPFLKLKQRQANLVLKIIQRLPSAKESPDKFLEVCTWVDQIAALNDSKTRKTTSETVRAVLDSLSEKKKPSPAAD

SEQ ID NO: 388 - protein, 167 aa, Artificial
  Table XXIX variant 30
MANTKYNKEFLLYLAGFVDGDGSIIAQIKPNQEYKFKHYLSLTFAVTQKTQRRWFLDKLVDEIGAGYVYDSGCVSYYKLSEIKPLHNFLTQLQPFLKLKQKQANLVLKIIEQLPSAKESPDKFLEVCTWADQIAAQNDSKTRKTTSETVRAVLDSRSEKKKSSPAAD

SEQ ID NO: 389 - protein, 167 aa, Artificial
  Table XXIX variant 31
MANTKYNKEFLLYLAGFVDGDGSIIAQIKPNQDYKFKHYLSLTFAVTQKTQRRWFLDKLVNEIGVGYVYDSGSVSYYKLSEIKPLHNFLTQLQPFLKLKQKQANLVLKIIEQLPSAKESPDKFLEVCTWVDQIAALNDSKTRKTTSETVRAVLDSLSEKKKSSPAAD

SEQ ID NO: 390 - protein, 167 aa, Artificial
  Table XXIX variant 32
MANTKYNKEFLLYLAGFVDGDGSIIAQIKPNQEYKFKHYLSLTFAVTQKTQRRWFLDKLVDEIGVGYVYDSGSISYYKLSEIKPLHNLLTQLQPFLKLKQKQANLVLKIIEQLPSAKESPDKFLEVCTWVDQIAALNDSKTRKTTSETVRAVLDSLSEKKKSSPAAD

SEQ ID NO: 391 - protein, 167 aa, Artificial
  Table XXIX variant 33
MANTKYNKEFLLYLAGFVDGDGSIIAQIKPNQDYKFKHYLCLTFAVTQKTQRRWFLDKLVDEIGVGYVYDSGSVSYYKLSEIKPLHNFLTQLQPFLKLKQKQANLVLKIIEQLPSAKESPDKFLEVCTWVDQIAALNDSKTRKTTSETVRAVLDSLSEKKKSSPAAD

SEQ ID NO: 392 - protein, 167 aa, Artificial
  Table XXIX variant 34
MANTKYNKEFLLYLAGFVDGDGSIIAQIKPNQEYKFKHYLSLTFAVTQKAQRRWFLDKLVDEIGVGYVYDSGSVSYYKLSEIKPLHNFLTQLQPFLKLKQKQANLVLKIIEQLPSAKESPDKFLEVCTWVDQIAALNDSKTRKTTSETVRAVLDSLSEKKKSSPAAD

SEQ ID NO: 393 - protein, 167 aa, Artificial
  Table XXIX variant 35
MANTKYNKEFLLYLAGFVDGDGSIIAQIKPNQSRKFKHELSLTFAVTQKTQRRWFLDKLVDEIGVGYVYDSGSVSYYKLSEIKPLRNFLTQLQPFLKLKQKQANLVLKIIEQLPSAKESPDKFLEVCTWVDQIAALNDSKTRKTTSETVRAVLDSLSEKKKSSPAAD

SEQ ID NO: 394 - protein, 167 aa, Artificial
  Table XXIX variant 36
MANTKYNKEFLLYLAGFVDGDGSIIAQIKPNQEYKFKHYLSLTFAVTQKTQRRWFLDKLVDEIGVGYVYDSGSVSYYKLSEIKPLHNFLTQLQPFLKLKQKQANLVLKIIEQLPSAKESPDKFLEVCTWVDQIAALNDSKTRKTTSETVRAVLDSLSEKRKSSPAAD

SEQ ID NO: 395 - protein, 167 aa, Artificial
  Table XXIX variant 37
MANTKYNKEFLLYLAGFVDGDGSIIAQIKPNQKYKFKHYLSLTFAVTQKTQRRWFLDKLVDEIGVGYVYDSGSVSYYNLSEIKPLHNFLTQLQPFLKLKQKQANLVLKIIEQLPSAKESPDKFLEVCTWVDQIATLNDSKTRKTTSETVRAVLDSLSEKKKSSPAAD

SEQ ID NO: 396 - protein, 167 aa, Artificial
  Table XXIX variant 38
MANTKYNKEFLLYLAGFVDGDGSIIAQIKPNQTRKFKHELSLTFAVTQKTQRRWFLDKLVDEIGVGYVYDSGSVSYYKLSEIKPLHNFLTQLQPFLKLKQKQANLVLKIIEQLPSAKESPDKFLEVCTWVDQIAALNDSKTRKTTSETVRAVLDSLSEKKKSSPAAD

SEQ ID NO: 397 - protein, 167 aa, Artificial
  Table XXIX variant 39
MANTKYNKEFLLYLAGFVDGDGSIIAQIKPKQEYKFKHYLSLTFAVTQKTQRRWFLDKLVDEIGVGYVYDSGSVSYYKLSEIKPLHNFLTQLQPFLKLKQKQANLVLKIIEQLPSAKESPDKFLEVCTWVDQIAALNDSKTRKTTSETVRAVLDSLSEKKKSSPAAD

SEQ ID NO: 398 - protein, 167 aa, Artificial
  Table XXIX variant 40
MANTKYNKEFLLYLAGFVDGDGSIIAQIKPNQEYKFKHYLSLTFAVTQKTQRRWFLDKLVDEIGVGYVYDSGSVSYYKLSEIKPLHNFLTQLQPFLQLKQKQANLVLKIIEQLPSAKESPDKFLEVCTWVDQIAALNDSKTRKTTSETVRAVLDSLSEKKKSSPAAD

SEQ ID NO: 399 - protein, 167 aa, Artificial
  Table XXIX variant 41
MANSKYNKEFLLYLAGFVDGDGSIIAQIKPNQEYKFKHYLSLTFAVTQKTQRRWFLDKLVDEIGVGYVYDSGSVSYYKLSEIKPLHNFLTQLQPFLKLKQKQANLVLKIIEQLPSAKESPDKFLEVCTWVDQIAALNDSKTRKTTSETVRAVLDSLSEKKKSSPAAD

SEQ ID NO: 400 - protein, 167 aa, Artificial
  Table XXIX variant 42
MANTKYNKEFLLYLAGFVDGDGSIIAQIKPNQEYKFKHYLSLTFAVTQKTQRRWFLDKLVDEIGVGYVYDSGSVSYYKLSEIKPLHNFLTQLQPFLKLKQKQANLGLKIIEQLPSAKESPDKFLEVCTWVDQIAALNDSKTRKTTSETVRAVLDSLSEKKKSSPAAD

SEQ ID NO: 401 - protein, 167 aa, Artificial; identical to SEQ ID NO: 286
  Table XXIX variant 43

SEQ ID NO: 402 - protein, 167 aa, Artificial
  Table XXIX variant 44
MANTKYNEEFLLYLAGFVDGDGSIIAQIKPNQDYKFNHYLSLTFAVTQKTQRRWFLDKLVDEIGVGYVYDSGSVSYYKLSEIKPLHNFLTQLQPFLKLKQKQANLVLKIIEQLPSAKESPDKFLEVCTWVDQIAALNDSKTRKTTSETVRAVLDSLSEKKKSSPAAD

SEQ ID NO: 403 - protein, 167 aa, Artificial
  Table XXIX variant 45
MANTKYNKEFLLYLAGFVDGDGSIIAQIKPRHDYKFKHQLSLTFAVTQKAQRRWFLDKLVDEIGVGYVYDSGSVSYYKLSEIKPLHNFLTQLQPFLKLKQKQANLVLKIIEQLPSAKESPDKFLEVCTWVDQIAALNDSKTRKTTSETVRAVLDSLSEKKKSSPAAD

SEQ ID NO: 404 - protein, 167 aa, Artificial
  Table XXIX variant 46
MANTKYNKEFLLYLAGFVDGDGSIIAQIKPNQTYKFKHSLSLTFAVTQKTQRRWFLDKLVDEIGVGYVYDSGSVSYYKLSEIKPLHNFLTQLQPFLKLKQKQANLVLKIIEQLPTAKESPDKFLEVCTWVDQIAALNDSKTRKTTSETVRAVLDSLSEKKKSSPAAD

SEQ ID NO: 405 - protein, 167 aa, Artificial
  Table XXIX variant 47
MANTKYNKEFLLYLAGFVDGDGSIIAQIKPNQSRKFKHELSLTFAVTQKTQRRWFLDKLVDEIGVGYVYDSGSVSYYKLSEIKPLHNFLTQLQPFLKLKQKQANLVLKIIEQLPSAKESPDKFLEVCTWVDQIAALNDSKTRKTTSETVRAVLDSLSEKKKSSSAAD

SEQ ID NO: 406 - protein, 167 aa, Artificial
  Table XXIX variant 48
MANTKYNKEFLLYLAGFVDGDGSIIAQIKPNQSHKFKHELSLTFAVTQKTQRRWFLDKLVDEIGVGHVYDSGSVSYYKLSEIKPLHNFLTQLQPFLKLKQKQANLVLKIIEQLPSAKESPDKFLEVCTWVDQIAALNDSKTRKTTSETVRAVLDSLSEKKKSSPAAD

SEQ ID NO: 407 - protein, 167 aa, Artificial
  Table XXIX variant 49
MANTKYNKEFLLYLAGFVDGDGSIIAQIKPNQDYKFKHYLSLTFAVTQKTQRRWFLDKLVDEIGVGYVYDSGYVSYYKLSEIKPLHNFLTQLQPFLKLKQKQANLVLKIIEQLPSAKESPDKFLEVCTWVDQIAALNDSKTRKTTSETVRAVLDSLSEKKKSSPAAD

SEQ ID NO: 408 - protein, 167 aa, Artificial
  Table XXIX variant 50
MANTKYNKEFLLYLAGFVDGDGSIIAQIKPNQSRKFKHRLSLTFAVTQKTQRRWFLDKLVDEIGVGYVYDSGSVSYYRLSEIKPLHNFLTQLQPFLKVKQKQANLVLKIIEQLPSAKESPDKFLEVCTWVDQIAALNDSKTRKTTSETVRAVLDSLSEKKKASPAAD

SEQ ID NO: 409 - protein, 167 aa, Artificial
  Table XXIX variant 51
MANTKYNKEFLLYMAGFVDGDGSIIAQIKPNQEYKFKHYLSLTFAVTQKTQRRWFLDKLVDEIGVGYVYDSGSVSYYKLSEIKPLHNFLTQLQPFLKLKQKQANLVLKIIEQLPSAKESPDKFLEVCTWVDQIAALNDSKTRKTTSETVRAVLDSLSEKKKSSPAAD

SEQ ID NO: 410 - protein, 167 aa, Artificial
  Table XXIX variant 52
MANTKYNKEFLLYLAGFVDGDGSIIAQIKPNQEYKFKHYLSLTFAVTQKTQRRWFLDKLVDEIGVGYVYDSGSVSYYKLSEIKPLHNFLTQLQPFLKLKQKQANLVLEIIEQLPSAKESPDKFLEVCTWVDQIAALNDSKTRKTTSETVRAVLDSLSEKKKSSPAAD

SEQ ID NO: 411 - protein, 167 aa, Artificial
  Table XXIX variant 53
MANTKYNKEFLLYLAGFVDGDGSIIAQIKPRQDYKFKHQLSLTFAVTQKTQRRWFLDKLVDEIGVGYVYDSGSVSYYKLSEIKPLHNFLTQLQPFLKLKQNQANLVLKIIEQLPSAKESPDKFLEVCTWVDQIAALNDSKTRKTTSETVRAVLDSLSEKKKSSPAAD

SEQ ID NO: 412 - protein, 167 aa, Artificial
  Table XXIX variant 54
MANTKYNKEFLLYLAGFVDGDGSIIAQIKPRQDYKFKHQLSLTFAVTQKTQRRWFLDKLVDEIGVGYVYDSGSVSYYKLSEIKPLHNFLTQLQPFLKLKQKQANLVLKIIEQLPTAKESPAKFLEVCTWVDQIAALNDSKTRKTTSETVRAVLDSLSEKKKSSPAAD

SEQ ID NO: 413 - protein, 167 aa, Artificial
  Table XXIX variant 55
MANTKYNKEFLLYLAGFVDGDGSIIAQIKPNQEYKFKHYLSLTFAVTQKTQRRWFLDKLVDEIGAGYVYDSGSVSYYKLSEIMPLHNFLTQLQPFLKLKQKQANLVLKIIEQLPSAKESPDKFLEVCTWVDQIAALNDSKTRKTTSETVRAVLDSLSEKKKSSPAAD

SEQ ID NO: 414 - protein, 167 aa, Artificial; identical to SEQ ID NO: 284
  Table XXIX variant 56

SEQ ID NO: 415 - protein, 167 aa, Artificial
  Table XXIX variant 57
MANTKYNKEFLLYLAGFVDGDGSIIAQIKPNQDYKFKHYLSLTFAVTQKTQRRWFLDKLVDEIGVGYVYDSESVSYYKLSEIKPLHNFLTQLQPFLKLKQKQANLVLKIIEQLPSAKESPDKFLEVCTWVDQIAALNDSKTRKTTSETVRAVLDSLSEKKKSSPAAD

SEQ ID NO: 416 - protein, 167 aa, Artificial
  Table XXIX variant 58
MANTKYNKEFLLYLAGFVDGDGSIIAQIKPNQSRKFKHRLSLTFAVTQKTQRRWFLDRLVDEIGVGYVYDSGSVSYYKLSEIKPLHNFLTQLQPFLKLKQKQANLVLKIIEQLPSAKESPDKFLEVCTWVDQIAALNDSKTRKTTSETVRAVLDSLSEKKKSSPAAD

SEQ ID NO: 417 - protein, 167 aa, Artificial
  Table XXIX variant 59
MANTKYNKEFLLYLAGFVDGDGSIIAQIKPNQTYKFKHWLSLTFAVTQKTQRRWFLDKLVDEIGVGYVRDSGSVSYYYLSKIKPLHNFLTQLQPFLKLKQKQANLVLKIIDQLPSAKESPDKFLEVCTWVDQIAALNDSKTRKTTSETVRAVLDSLSEKKKSSPAAD

SEQ ID NO: 418 - protein, 167 aa, Artificial
  Table XXIX variant 60
MANTKYNKEFLLYLAGFVDGDGSIIAQIKPRQDYKFKHQLSLTFAVTQKTQRRWFLDKLVDEIGVGYVYDSGSVSYYKLSEIKPLHNFLTQLQPFLKLKQKQANLVLRIIEQLPSAKESPDKFLEVCTWVDQIAALNDSKTRKTTSETVRAVLDSLSEKKKSSPAAD

SEQ ID NO: 419 - protein, 167 aa, Artificial
  Table XXIX variant 61
MANTKYNKEFLLYLAGFVDGDGSIIAQIKPNQTYKFKHSLSLTFAVTQKTQRRWFLDKLVDEIGVGYVYDSGSVSYYKLSEIKPLHNFLTQLQPFLKLKQKQANLVLKIIEQLPSAKESPGKFLEVCTWVDQIAALNDSKTRKTTSETVRAVLDSLSEKKKSSPAAD

SEQ ID NO: 420 - protein, 167 aa, Artificial
  Table XXIX variant 62
MANTKYNKEFLLYLAGFVDGDGSIIAQIKPNQSRKFKHELSLTFNVTQKTQRRWFLDKLVDEIGVGYVHDSGSVSYYNLSKIKPLHNFLTQLQPFLKLKQKQANLVLKIIEKLPSAKESPDKFLEVCTWVDRVAALNDSKTRKTTSETVRAVLDSLSEKKKSSPAAD

SEQ ID NO: 421 - protein, 167 aa, Artificial
  Table XXIX variant 63
MANTKYNKEFLLYLAGFVDGDGSIIAQIKPNQDYKFKHYLSLTFAVTQKTQRRWLLDKLVDEIGVGYVYDSGSVSYYKLGEIKPLHNFLTQLQPFLKLKQKQANLVLKIIEQLPSAKESPDKFLEVCTWADQIAALNDSKTRKTTSETVRAVLDSLGEKKKSSPAAD

SEQ ID NO: 422 - protein, 167 aa, Artificial; identical to SEQ ID NO: 366
  Table XXX HSV 4.4 variant 1

SEQ ID NO: 423 - protein, 167 aa, Artificial; identical to SEQ ID NO: 36
  Table XXX HSV 4.4 variant 2

SEQ ID NO: 424 - protein, 167 aa, Artificial; identical to SEQ ID NO: 361
  Table XXX HSV 4.4 variant 3

SEQ ID NO: 425 - protein, 167 aa, Artificial; identical to SEQ ID NO: 360
  Table XXX HSV 4.4 variant 4

SEQ ID NO: 426 - protein, 167 aa, Artificial; identical to SEQ ID NO: 364
  Table XXX HSV 4.4 variant 5

SEQ ID NO: 427 - protein, 167 aa, Artificial; identical to SEQ ID NO: 359
  Table XXX HSV 4.4 variant 6

SEQ ID NO: 428 - protein, 167 aa, Artificial; identical to SEQ ID NO: 319
  Table XXX HSV 4.3 variant 1

SEQ ID NO: 429 - protein, 167 aa, Artificial; identical to SEQ ID NO: 336
  Table XXX HSV 4.3 variant 2

SEQ ID NO: 430 - protein, 167 aa, Artificial; identical to SEQ ID NO: 331
  Table XXX HSV 4.3 variant 3

SEQ ID NO: 431 - protein, 167 aa, Artificial; identical to SEQ ID NO: 328
  Table XXX HSV 4.3 variant 4

SEQ ID NO: 432 - protein, 167 aa, Artificial; identical to SEQ ID NO: 326
  Table XXX HSV 4.3 variant 5

SEQ ID NO: 433 - protein, 167 aa, Artificial; identical to SEQ ID NO: 347
  Table XXX HSV 4.3 variant 6

SEQ ID NO: 434 - DNA, 77 bp, Artificial
  attB1-ICreIFor
ggggacaagtttgtacaaaaaagcaggcttcgaaggagatagaaccatggccaataccaaatataacaaagagttcc

SEQ ID NO: 435 - DNA, 64 bp, Artificial
  attB2-ICreIRev
ggggaccactttgtacaagaaagctgggtttagtcggccgccggggaggatttcttcttctcgc

SEQ ID NO: 436 - protein, 167 aa, Artificial; identical to SEQ ID NO: 36
  Table XXXI HSV4.4 optimized variant 1

SEQ ID NO: 437 - protein, 167 aa, Artificial
  Table XXXI HSV4.4 optimized variant 2
MANTKYNKEFLLYLAGFVDGDGSIFAQIKPNQFYKFKHYLSLTFAVTQKTQRRWFLDKLVDEIGVGYVYDSGSVSYYKLSEIKPLHNFLTQLQPFLKLKQKQANLVLRIIEQLPSAKESPDKFLEVCTWVDQIAALNDSKTRKTTSETVRAVLDSLSEKKKSSPAAD

SEQ ID NO: 438 - protein, 167 aa, Artificial
  Table XXXI HSV4.4 optimized variant 3
MANTKYNKEFLLYLAGFVDGDGSIIAQIKPNQSYKFKHQLSLTFQVTQKTQRRWFLDKLVDEIGVGYVRDSGSVSYYKLSKIKPLHNFLTQLQPFLKLKQKQASLVLKIIEQLPSAKESPDKFLEVCTWVDQIAALNDSKTRKTTSETVRAVLDSLSEKKKSSPAAD

SEQ ID NO: 439 - protein, 167 aa, Artificial; identical to SEQ ID NO: 359
  Table XXXI HSV4.4 optimized variant 4

SEQ ID NO: 440 - protein, 167 aa, Artificial
  Table XXXI HSV4.3 optimized variant 1
MANTKYNKEFLLYLAGFVDGDGSIIAQISPNQSYKFKHQLKLTFLVTQKTQRRWFLDKLVDEIGVGYVRDNGSVSDYILSRIKPLHNFLTQLQPFLKLKQKQANLVLKIIEQLPSAKESPDKFLEVCTWVDQVAALNDSKTRKTTSETVRAVLDSLSEKKKSSPAAD

SEQ ID NO: 441 - protein, 167 aa, Artificial; identical to SEQ ID NO: 3
  Table XXXI HSV4.3 optimized variant 2

SEQ ID NO: 442 - protein, 167 aa, Artificial
  Table XXXI HSV4.3 optimized variant 3
MANTKYNKEFLLYLAGFVDGDGSIIAQISPNQSYKFKHQLKLTLLVTQKTQRRWFLDKLVDEIGVGYVRDNGSVSDYILSKIKPLHNFLTQLQPFLKLKQKQANLVLKIIEQLPSAKESPDKFLEVCTWVDQVAALNDSKTRKTTSETVRAVLDSLSEKKKSSPAAD

SEQ ID NO: 443 - protein, 167 aa, Artificial
  Table XXXI HSV4.3 optimized variant 4
MANTKYNKEFLLYLAGFVDGDGSIIAQIKPNQSYKFKHQLSLTFMVTQKTQRRWLLDKLVDEIGVGYVRDAGSVSDYVLSEIKPLHNFLTQLQPFLKLKQKQANLVLKIIEQLPSAKESPDKFLEVCTWVDQVAALNDSKTRKTTSETVRAVLDSLSEKKKSSPAAD

SEQ ID NO: 444 - protein, 167 aa, Artificial
  Table XXXI HSV4.3 optimized variant 5
MANTKYNKEFLLYLAGFVDGDGSIIAQISPNQSYKFKHQLKLTFMVTQKTQRRWFLDKLVDEIGVGYVRDNGSVSDYILSKIKPLHNFLTQLQPFLKLKQKQANLVLKIIEQLPSAKESPDKFLEVCTWVDQIAALNDSKTRKTTSETVRAVLDSLSEKKKSSPAAD

SEQ ID NO: 445 - protein, 167 aa, Artificial; identical to SEQ ID NO: 347
  Table XXXI HSV4.3 optimized variant 6

SEQ ID NO: 446 - protein, 354 aa, Artificial
  SCOH-HSV4-M2-MF
MANTKYNEEFLLYLAGFVDGDGSIIAQIKPNQSYKFKHQLSLTFMVTQKTQRRWFLDKLVDEIGVGYVRDAGSVSNYILSKIKPLHNFLTQLQPFLELKQKQANLVLKIIEQLPSAKESPDKFLEVCTWVDQVAALNDSKTRKTTSKTVRAVLDSLGEKKKSSPAAGGSDKYNQALSKYNQALSKYNQALSGGGGSNKKFLLYLAGFVDSDGSIIAQIKPNQEYKFKHYLSLTFAVTQKTQRRWFLDKLVDRIGVGYVYDSGSVSYYKLSEIKPLHNFLTQLQPFLKLKQKQANLALKIIEQLPSAKESPDKFLEVCTWVDQIAALNDSKTRKTTSETVRAVLDSLSEKKKSSP

SEQ ID NO: 447 - protein, 354 aa, Artificial
  SCOH-HSV4-M2-MF-54L
MANTKYNEEFLLYLAGFVDGDGSIIAQIKPNQSYKFKHQLSLTFMVTQKTQRRWFLDKLVDEIGVGYVRDAGSVSNYILSKIKPLHNFLTQLQPFLELKQKQANLVLKIIEQLPSAKESPDKFLEVCTWVDQVAALNDSKTRKTTSKTVRAVLDSLGEKKKSSPAAGGSDKYNQALSKYNQALSKYNQALSGGGGSNKKFLLYLAGFVDSDGSIIAQIKPNQEYKFKHYLSLTFAVTQKTQRRWLLDKLVDRIGVGYVYDSGSVSYYKLSEIKPLHNFLTQLQPFLKLKQKQANLALKIIEQLPSAKESPDKFLEVCTWVDQIAALNDSKTRKTTSETVRAVLDSLSEKKKSSP

SEQ ID NO: 448 - protein, 354 aa, Artificial
  SCOH-HSV4-M2-MF-132V
MANTKYNEEFLLYLAGFVDGDGSIIAQIKPNQSYKFKHQLSLTFMVTQKTQRRWFLDKLVDEIGVGYVRDAGSVSNYILSKIKPLHNFLTQLQPFLELKQKQANLVLKIIEQLPSAKESPDKFLEVCTWVDQVAALNDSKTRKTTSKTVRAVLDSLGEKKKSSPAAGGSDKYNQALSKYNQALSKYNQALSGGGGSNKKFLLYLAGFVDSDGSIIAQIKPNQEYKFKHYLSLTFAVTQKTQRRWFLDKLVDRIGVGYVYDSGSVSYYKLSEIKPLHNFLTQLQPFLKLKQKQANLALKIIEQLPSAKESPDKFLEVCTWVDQVAALNDSKTRKTTSETVRAVLDSLSEKKKSSP

SEQ ID NO: 449 - protein, 354 aa, Artificial
  SCOH-HSV4-M2-54L-MF
MANTKYNEEFLLYLAGFVDGDGSIIAQIKPNQSYKFKHQLSLTFMVTQKTQRRWLLDKLVDEIGVGYVRDAGSVSNYILSKIKPLHNFLTQLQPFLELKQKQANLVLKIIEQLPSAKESPDKFLEVCTWVDQVAALNDSKTRKTTSKTVRAVLDSLGEKKKSSPAAGGSDKYNQALSKYNQALSKYNQALSGGGGSNKKFLLYLAGFVDSDGSIIAQIKPNQEYKFKHYLSLTFAVTQKTQRRWFLDKLVDRIGVGYVYDSGSVSYYKLSEIKPLHNFLTQLQPFLKLKQKQANLALKIIEQLPSAKESPDKFLEVCTWVDQIAALNDSKTRKTTSETVRAVLDSLSEKKKSSP

SEQ ID NO: 450 - protein, 354 aa, Artificial
  SCOH-HSV4-M2-54L-MF-132V
MANTKYNEEFLLYLAGFVDGDGSIIAQIKPNQSYKFKHQLSLTFMVTQKTQRRWLLDKLVDEIGVGYVRDAGSVSNYILSKIKPLHNFLTQLQPFLELKQKQANLVLKIIEQLPSAKESPDKFLEVCTWVDQVAALNDSKTRKTTSKTVRAVLDSLGEKKKSSPAAGGSDKYNQALSKYNQALSKYNQALSGGGGSNKKFLLYLAGFVDSDGSIIAQIKPNQEYKFKHYLSLTFAVTQKTQRRWFLDKLVDRIGVGYVYDSGSVSYYKLSEIKPLHNFLTQLQPFLKLKQKQANLALKIIEQLPSAKESPDKFLEVCTWVDQVAALNDSKTRKTTSETVRAVLDSLSEKKKSSP

SEQ ID NO: 451 - protein, 354 aa, Artificial
  SCOH-HSV4-M2-54L-MF-80K132V
MANTKYNEEFLLYLAGFVDGDGSIIAQIKPNQSYKFKHQLSLTFMVTQKTQRRWLLDKLVDEIGVGYVRDAGSVSNYILSKIKPLHNFLTQLQPFLELKQKQANLVLKIIEQLPSAKESPDKFLEVCTWVDQVAALNDSKTRKTTSKTVRAVLDSLGEKKKSSPAAGGSDKYNQALSKYNQALSKYNQALSGGGGSNKKFLLYLAGFVDSDGSIIAQIKPNQEYKFKHYLSLTFAVTQKTQRRWFLDKLVDRIGVGYVYDSGSVSYYKLSKIKPLHNFLTQLQPFLKLKQKQANLALKIIEQLPSAKESPDKFLEVCTWVDQVAALNDSKTRKTTSETVRAVLDSLSEKKKSSP

SEQ ID NO: 452 - protein, 354 aa, Artificial
  SCOH-HSV4-M2-105A-MF
MANTKYNEEFLLYLAGFVDGDGSIIAQIKPNQSYKFKHQLSLTFMVTQKTQRRWFLDKLVDEIGVGYVRDAGSVSNYILSKIKPLHNFLTQLQPFLELKQKQANLALKIIEQLPSAKESPDKFLEVCTWVDQVAALNDSKTRKTTSKTVRAVLDSLGEKKKSSPAAGGSDKYNQALSKYNQALSKYNQALSGGGGSNKKFLLYLAGFVDSDGSIIAQIKPNQEYKFKHYLSLTFAVTQKTQRRWFLDKLVDRIGVGYVYDSGSVSYYKLSEIKPLHNFLTQLQPFLKLKQKQANLALKIIEQLPSAKESPDKFLEVCTWVDQIAALNDSKTRKTTSETVRAVLDSLSEKKKSSP

SEQ ID NO: 453 - protein, 354 aa, Artificial; identical to SEQ ID NO: 452
  SCOH-HSV4-M2-105A-MF-132V

SEQ ID NO: 454 - protein, 354 aa, Artificial
  SCOH-HSV4-M2-105A-MF-80K132V
MANTKYNEEFLLYLAGFVDGDGSIIAQIKPNQSYKFKHQLSLTFMVTQKTQRRWFLDKLVDEIGVGYVRDAGSVSNYILSKIKPLHNFLTQLQPFLELKQKQANLALKIIEQLPSAKESPDKFLEVCTWVDQVAALNDSKTRKTTSKTVRAVLDSLGEKKKSSPAAGGSDKYNQALSKYNQALSKYNQALSGGGGSNKKFLLYLAGFVDSDGSIIAQIKPNQEYKFKHYLSLTFAVTQKTQRRWFLDKLVDRIGVGYVYDSGSVSYYKLSKIKPLHNFLTQLQPFLKLKQKQANLALKIIEQLPSAKESPDKFLEVCTWVDQVAALNDSKTRKTTSETVRAVLDSLSEKKKSSP

SEQ ID NO: 455 - protein, 167 aa, Artificial
  Table VIII variant 32
MANTKYNKEFLLYLAGFVDGDGSIVAQIKPNQSYKFKHQLSLTFTVTQKTQRRWFLDKLVDEIGVGYVEDSGSVSRYRLSEIKPLHNFLTQLQPFLKLKQKQANLVLKIIEQLPSAKESPDKFLEVCTWVDQIAALNDSKTRKTTSETVRAVLDSLSEKKKSSPAAD

SEQ ID NO: 456 - protein, 167 aa, Artificial
  Table VIII variant 33
MANTKYNKEFLLYLAGFVDGDGSIVAQIKPNQSYKFKHQLSLTFRVTQKTQRRWFLDKLVDEIGVGYVYDSGSVSYYTLSEIKPLHNFLTQLQPFLKLKQKQANLVLKIIEQLPSAKESPDKFLEVCTWVDQIAALNDSKTRKTTSETVRAVLDSLSEKKKSSPAAD

SEQ ID NO: 457 - protein, 167 aa, Artificial
  Table VIII variant 34
MANTKYNKEFLLYLAGFVDGDGSIIAQIKPNQSYKFKHQLSLTFNVTQKTQRRWFLDKLVDEIGVGYVYDSGSVSRYQLSEIKPLHNFLTQLQPFLKLKQKQANLVLKIIEQLPSAKESPDKFLEVCTWVDQIAALNDSKTRKTTSETVRAVLDSLSEKKKSSPAAD

SEQ ID NO: 458 - protein, 167 aa, Artificial
  Table VIII variant 35
MANTKYNKEFLLYLAGFVDGDGSIVAQIKPNQSYKFKHQLSLTFNVTQKTQRRWFLDKLVDEIGVGYVYDSGSVSYYKLSEIKPLHNFLTQLQPFLKLKQKQANLVLKIIEQLPSAKESPDKFLEVCTWVDQIAALNDSKTRKTTSETVRAVLDSLSEKKKSSPAAD

SEQ ID NO: 459 - protein, 167 aa, Artificial
  Table VIII variant 36
MANTKYNKEFLLYLAGFVDGDGSIIAQIKPNQSYKFKHQLSLTFNVTQKTQRRWFLDKLVDEIGVGYVKDSGSVSRYNLSEIKPLHNFLTQLQPFLKLKQKQANLVLKIIEQLPSAKESPDKFLEVCTWVDQIAALNDSKTRKTTSETVRAVLDSLSEKKKSSPAAD

SEQ ID NO: 460 - protein, 167 aa, Artificial
  Table VIII variant 37
MANTKYNKEFLLYLAGFVDGDGSIIAQIKPNQSYKFKHQLSLTFRVTQKTQRRWFLDKLVDEIGVGYVYDSGSVSYYNLSEIKPLHNFLTQLQPFLKLKQKQANLVLKIIEQLPSAKESPDKFLEVCTWVDQIAALNDSKTRKTTSETVRAVLDSLSEKKKSSPAAD

SEQ ID NO: 461 - protein, 167 aa, Artificial; identical to SEQ ID NO: 89
  Table VIII variant 38

SEQ ID NO: 462 - protein, 167 aa, Artificial
  Table VIII variant 39
MANTKYNKEFLLYLAGFVDGDGSIVAQIKPNQSYKFKHQLSLTFAVTQKTQRRWFLDKLVDEIGVGYVYDSGSVSRYVLSEIKPLHNFLTQLQPFLKLKQKQANLVLKIIEQLPSAKESPDKFLEVCTWVDQIAALNDSKTRKTTSETVRAVLDSLSEKKKSSPAAD

SEQ ID NO: 463 - protein, 167 aa, Artificial
  Table VIII variant 40
MANTKYNKEFLLYLAGFVDGDGSIVAQIKPNQSYKFKHQLSLTFSVTQKTQRRWFLDKLVDEIGVGYVEDSGSVSRYKLSEIKPLHNFLTQLQPFLKLKQKQANLVLKIIEQLPSAKESPDKFLEVCTWVDQIAALNDSKTRKTTSETVRAVLDSLSEKKKSSPAAD

SEQ ID NO: 464 - protein, 32 aa, Artificial
  peptide linker
AAGGSDKYNQALSKYNQALSKYNQALSGGGGS

SEQ ID NO: 465 - protein, 354 aa, Artificial
  SCOH-HSV12-M1-ME-132V
MANTKYNEEFLLYLAGFVDGDGSIVAQIKPNQSCKFKHSLSLTFIVTQKTRRRWFLDKLVDEIGVGYVRDSGSVSNYRLSEIKPLHNFLTQLQPFLELKQKQANLVLKIIEQLPSAKESPDKFLEVCTWVDQVAALNDSKTRKTTSETVRAVLDSLSEKKKSSPAAGGSDKYNQALSKYNQALSKYNQALSGGGGSNKKFLLYLAGFVDSDGSIIAQIKPRQSSKFKHQLSLTFKVTQKTQRRWFLDKLVDRIGVGHVYDSGSVSDYTLSEIKPLHNILTQLQPFLKLKQKQANLVLKIIEQLPSAKESPDKFLEVCTWVDQVAALNDSRTRKTTSETVRAVLDSLSEKKKSSS

SEQ ID NO: 466 - protein, 354 aa, Artificial
  SCOH-HSV12-M1-80K-ME-132V
MANTKYNKEFLLYLAGFVDGDGSIVAQIKPNQSCKFKHSLSLTFIVTQKTRRRWFLDKLVDEIGVGYVRDSGSVSNYRLSKIKPLHNFLTQLQPFLKLKQKQANLVLKIIEQLPSAKESPDKFLEVCTWVDQVAALNDSKTRKTTSETVRAVLDSLSEKKKSSPAAGGSDKYNQALSKYNQALSKYNQALSGGGGSNKKFLLYLAGFVDSDGSIIAQIKPRQSSKFKHQLSLTFKVTQKTQRRWFLDKLVDRIGVGHVYDSGSVSDYTLSEIKPLHNILTQLQPFLKLKQKQANLVLKIIEQLPSAKESPDKFLEVCTWVDQVAALNDSRTRKTTSETVRAVLDSLSEKKKSSS

SEQ ID NO: 467 - DNA, 18 bp, Artificial
  I-SceI cleavage site
tagggataacagggtaat

SEQ ID NO: 468 - protein, 354 aa, Artificial
  SCOH-RAG
MANTKYNEEFLLYLAGFVDGDGSIIAQINPNQSSKFKHRLRLTFYVTQKTQRRWFLDKLVDEIGVGYVRDSGSVSQYVLSEIKPLHNFLTQLQPFLELKQKQANLVLKIIEQLPSAKESPDKFLEVCTWVDQIAALNDSKTRKTTSETVRAVLDSLSGKKKSSPAAGGSDKYNQALSKYNQALSKYNQALSGGGGSNKKFLLYLAGFVDSDGSIIAQIKPRQSNKFKHQLSLTFAVTQKTQRRWFLDKLVDRIGVGYVYDSGSVSDYRLSEIKPLHNFLTQLQPFLKLKQKQANLVLKIIEQLPSAKESPDKFLEVCTWVDQIAALNDSKTRKTTSETVRAVLDSLSEKKKSSP

SEQ ID NO: 469 - protein, 237 aa, Artificial
  I-SceI meganuclease
MAKNIKKNQVMNLGPNSKLLKEYKSQLIELNIEQFEAGIGLILGDAYIRSRDEGKTYCMQFEWKNKAYMDHVCLLYDQWVLSPPHKKERVNHLGNLVITWGAQTFKHQAFNKLANLFIVNNKKTIPNNLVENYLTPMSLAYWFMDDGGKWDYNKNSTNKSIVLNTQSFTFEEVEYLVKGLRNKFQLNCYVKINKNKPIIYIDSMSYLIFYNLIKPYLIPQMMYKLPNTISSETFLKA

SEQ ID NO: 470 - protein, 167 aa, Artificial
  HSV1.3-M5
MANTKYNKEFLLYLAGFVDGDGSIIAQIKPRQSGKFKHTLSLTFQVTQKTQRRWFLDKLVDEIGVGYVRDRGSVSDYILSEIKPLHNFLTQLQPFLKLKQKQANLVPKIIEQLPSAKESPDKFLEVCTWVDQIAALNDSKTRKTTSETVRAVLDSLSEKKKSSPAAD

SEQ ID NO: 471 - protein, 167 aa, Artificial
  HSV1.4-MF
MANTKYNKEFLLYLAGFVDGDGSIIAQIKPGQSYKFKHRLSLTFKVTQKTQRRWFLDELVDEIGVGYVRDEGSVSNYILSEIKPLHNFLTQLQPFLKLKQKQANLVLKVIEQLPSAKESPDKFLEVCTWVDQIAALNDSKTRKTTSETVRAVLDSLSEKKKSSPAAD

SEQ ID NO: 472 - DNA, 24 bp, Artificial
  HSV_1.2
atgggacgtcgtacgggggcctgg

SEQ ID NO: 473 - DNA, 24 bp, Artificial
  10GGG_P
tcgggacgtcgtacgacgtcccga

SEQ ID NO: 474 - DNA, 24 bp, Artificial
  5GTC_P
tcaaaacgtcgtacgacgttttga

SEQ ID NO: 475 - DNA, 24 bp, Artificial
  10AGG_P
tcaggacgtcgtacgacgtcctga

SEQ ID NO: 476 - DNA, 24 bp, Artificial
  5CCC_P
tcaaaaccccgtacggggttttga

SEQ ID NO: 477 - DNA, 24 bp, Artificial
  HSV_1.3
atgggacgtcgtacgacgtcccat

SEQ ID NO: 478 - DNA, 24 bp, Artificial
  HSV_1.4
ccaggcccccgtacgggggcctgg

SEQ ID NO: 479 - DNA, 24 bp, Artificial
  HSV_1.5
atgggacgtcgtaagacgtcccat

SEQ ID NO: 480 - DNA, 24 bp, Artificial
  HSV_1.6
ccaggcccccgtaagggggcctgg

SEQ ID NO: 481 - DNA, 24 bp, Artificial
  HSV_8.1
ccgctctgttttaccgcgtctacg

SEQ ID NO: 482 - DNA, 24 bp, Artificial
  HSV_8.2
ccgctctgttgtaccgcgtctacg

SEQ ID NO: 483 - DNA, 24 bp, Artificial
  10GCT_P
tcgctacgtcgtacgacgtagcga

SEQ ID NO: 484 - DNA, 24 bp, Artificial
  5GTT_P
tcaaaacgttgtacaacgttttga

SEQ ID NO: 485 - DNA, 24 bp, Artificial
  10TAG_P
tctagacgtcgtacgacgtctaga

SEQ ID NO: 486 - DNA, 24 bp, Artificial
  5GCG_P
tcaaaacgcggtaccgcgttttga

SEQ ID NO: 487 - DNA, 24 bp, Artificial
  HSV_8.3
ccgctctgttgtacaacagagcgg

SEQ ID NO: 488 - DNA, 24 bp, Artificial
  HSV_8.4
cgtagacgcggtaccgcgtctacg

SEQ ID NO: 489 - DNA, 24 bp, Artificial
  HSV_8.5
ccgctctgttttacaacagagcgg

SEQ ID NO: 490 - DNA, 24 bp, Artificial
  HSV_8.6
cgtagacgcgttaccgcgtctacg

SEQ ID NO: 491 - DNA, 24 bp, Artificial
  HSV_9.1
gcaagaccaggtaaggcagggggg

SEQ ID NO: 492 - DNA, 24 bp, Artificial
  HSV_9.2
gcaagaccacgtacggcagggggg

SEQ ID NO: 493 - DNA, 24 bp, Artificial
  10AAG_P
tcaagacgtcgtacgacgtcttga

SEQ ID NO: 494 - DNA, 24 bp, Artificial
  5CAC_P
tcaaaaccacgtacgtggttttga

SEQ ID NO: 495 - DNA, 24 bp, Artificial
  10CCC_P
tccccacgtcgtacgacgtgggga

SEQ ID NO: 496 - DNA, 24 bp, Artificial
  5GCC_P
tcaaaacgccgtacggcgttttga

SEQ ID NO: 497 - DNA, 24 bp, Artificial
  HSV_9.3
gcaagaccaggtacgtggtcttgc

SEQ ID NO: 498 - DNA, 24 bp, Artificial
  HSV_9.4
cccccctgccgtacggcagggggg

SEQ ID NO: 499 - DNA, 24 bp, Artificial
  HSV_9.5
gcaagaccacgtaagtggtcttgc

SEQ ID NO: 500 - DNA, 24 bp, Artificial
  HSV_9.6
cccccctgccgtaaggcagggggg

SEQ ID NO: 501 - DNA, 24 bp, Artificial
  HSV_12.1
cctggacatggagacggggaacat

SEQ ID NO: 502 - DNA, 24 bp, Artificial
  HSV_12.2
cctggacatggtaccggggaacat

SEQ ID NO: 503 - DNA, 24 bp, Artificial
  10TGG_P
tctggacgtcgtacgacgtccaga

SEQ ID NO: 504 - DNA, 24 bp, Artificial
  5ATG_P
tcaaaacatggtaccatgttttga

SEQ ID NO: 505 - DNA, 24 bp, Artificial
  10GTT_P
tcgttacgtcgtacgacgtaacga

SEQ ID NO: 506 - DNA, 24 bp, Artificial
  5CCG_P
tcaaaacccggtaccgggttttga

SEQ ID NO: 507 - DNA, 24 bp, Artificial
  HSV_12.3
cctggacatggtaccatgtccagg

SEQ ID NO: 508 - DNA, 24 bp, Artificial
  HSV_12.4
atgttccccggtaccggggaacat

SEQ ID NO: 509 - DNA, 24 bp, Artificial
  HSV_12.5
cctggacatggagacatgtccagg

SEQ ID NO: 510 - DNA, 24 bp, Artificial
  HSV_12.6
atgttccccggagacggggaacat

SEQ ID NO: 511 - protein, 167 aa, Artificial
  Table xxxx HSV_8.5 / HSV_8.3 cleaving variant 1
MANTKYNKEFLLYLAGFVDGDGSIIAQIKPKQSAKFKHQLSLTFQVTQKTQRRWFLDKLVDEIGVGYVRDSGSVSHYYLSEIKPLHNFLTQLQPFLKLKQKQANLVLKIIERLPSAKESPDKFLEVCTWVDQIAALNDSKTRKTTSETVRAVLDSLSEKKKSSPAAD

SEQ ID NO: 512 - protein, 167 aa, Artificial
  Table xxxx HSV_8.5 / HSV_8.3 cleaving variant 2
MANTKYNKEFLLYLAGFVDGDGSIIAQIKPKQSTKFKHQLSLTFQVTQKTQRRWFLDKLVDEIGVGYVRDSGSVSHYYLSEIKPLHNFLTQLQPFLKLKQKQANLVLKIIERLPSAKESPDKFLEVCTWVDQIAALNDSKTRKTTSETVRAVLDSLSEKKKSSPAAD

SEQ ID NO: 513 - protein, 167 aa, Artificial
  Table xxxx HSV_8.5 / HSV_8.3 cleaving variant 3
MANTKYNKEFLLYLAGFVDGDGSIIAQIKPNQSHKFKHYLSLTFQVTQKTQRRWFLDKLVDEIGVGYVRDSGSVSHYYLSEIKPLHNFLTQLQPFLKLKQKQANLVLKIIERLPSAKESPDKFLEVCTWVDQIAALNDSKTRKTTSETVRAVLDSLSEKKKSSPAAD

SEQ ID NO: 514 - protein, 167 aa, Artificial
  Table xxxx HSV_8.5 / HSV_8.3 cleaving variant 4
MANTKYNKEFLLYLAGFVDGDGSIIAQIKPHQSSKFKHQLSLTFQVTQKTQRRWFLDKLVDEIGVGYVRDSGSVSHYYLSEIKPLHNFLTQLQPFLKLKQKQANLVLKIIERLPSAKESPDKFLEVCTWVDQIAALNDSKTRKTTSETVRAVLDSLSEKKKSSPAAD

SEQ ID NO: 515 - protein, 167 aa, Artificial
  Table xxxx HSV_8.5 / HSV_8.3 cleaving variant 5
MANTKYNKEFLLYLAGFVDGDGSIIAQIKPKQSCKFKHQLSLTFLVTQKTQRRWFLDKLVDEIGVGYVRDNGSVSNYILSKIKPLHNFLTQLQPFLKLKQKQANLVLKIIERLPSAKESPDKFLEVCTWVDQIAALNDSKTRKTTSETVRAVLDSLSEKKKSSPAAD

SEQ ID NO: 516 - protein, 167 aa, Artificial
  Table xxxx HSV_8.5 / HSV_8.3 cleaving variant 6
MANTKYNKEFLLYLAGFVDGDGSIIAQIKPKQSRKFKHQLSLTFQVTQKTQRRWFLDKLVDEIGVGYVRDSGSVSHYYLSEIKPLHNFLTQLQPFLKLKQKQANLVLKIIERLPSAKESPDKFLEVCTWVDQIAALNDSKTRKTTSETVRAVLDSLSEKKKSSPAAD

SEQ ID NO: 517 - protein, 167 aa, Artificial
  Table xxxx HSV_8.6 / HSV_8.4 cleaving variant 1
MANTKYNKEFLLYLAGFVDGDGSIIAQIKPNQHCKFKHQLALTFQVTQKTQRRWFLDKLVDEIGVGYVRDSGSVSNYKLSEIKPLHNFLTQLQPFLKLKQKQANLVLKIIERLPSAKESPDKFLEVCTWVDQIAALNDSKTRKTTSETVRAVLDSLSEKKKSSPAAD

SEQ ID NO: 518 - protein, 167 aa, Artificial
  Table xxxx HSV_8.6 / HSV_8.4 cleaving variant 2
MANTKYNKEFLLYLAGFVDGDGSIIAQIKPNQHCKFKHQLSLTFRVTQKTQRRWFLDKLVDEIGVGYVYDSGSVSYYNLSEIKPLHNFLTQLQPFLKLKQKQANLVLKIIERLPSAKESPDKFLEVCTWVDQIAALNDSKTRKTTSETVRAVLDSLSEKKKSSPAAD

SEQ ID NO: 519 - protein, 167 aa, Artificial
  Table xxxx HSV_8.6 / HSV_8.4 cleaving variant 3
MANTKYNKEFLLYLAGFVDGDGSIIAQIKPNQHCKFKHQLALTFRVTQKTQRRWFLDKLVDEIGVGYVYDSGSVSYYNLSEIKPLHNFLTQLQPFLKLKQKQANLVLKIIERLPSAKESPDKFLEVCTWVDQIAALNDSKTRKTTSETVRAVLDSLSEKKKSSPAAD

SEQ ID NO: 520 - protein, 167 aa, Artificial
  Table xxxx HSV_8.6 / HSV_8.4 cleaving variant 4
MANTKYNKEFLLYLAGFVDGDGSIIAQIKPHQTCKFKHQLSLTFRVTQKTQRRWFLDKLVDEIGVGYVYDSGSVSYYNLSEIKPLHNFLTQLQPFLKLKQKQANLVLKIIERLPSAKESPDKFLEVCTWVDQIAALNDSKTRKTTSETVRAVLDSLSEKKKSSPAAD

SEQ ID NO: 521 - protein, 167 aa, Artificial
  Table xxxx HSV_8.6 / HSV_8.4 cleaving variant 5
MANTKYNKEFLLYLAGFVDGDGSIIAQIKPNQNCKFKHQLSLTFQVTQKTQRRWFLDKLVDEIGVGYVRDSGSVSNYKLSEIKPLHNFLTQLQPFLKLKQKQANLVLKIIERLPSAKESPDKFLEVCTWVDQIAALNDSKTRKTTSETVRAVLDSLSEKKKSSPAAD

SEQ ID NO: 522 - protein, 167 aa, Artificial
  Table xxxxiii HSV_9.5 / HSV_9.3 cleaving variant 1
MANTKYNKEFLLYLAGFVDGDGSIIAQIKPGQSYKFKHRLSLTFIVTQKTQRRWFLDKLVDEIGVGYVEDRGSVSNYRLSKIKPLHNFLTQLQPFLKLKQKQANLVLKIIERLPSAKESPDKFLEVCTWVDQIAALNDSKTRKTTSETVRAVLDSLSEKKKSSPAAD

SEQ ID NO: 523 - protein, 167 aa, Artificial
  Table xxxxiii HSV_9.5 / HSV_9.3 cleaving variant 2
MANTKYNKEFLLYLAGFVDGDGSIIAQIKPGQSYKFKHRLSLTFVVTQKTQRRWFLDKLVDEIGVGYVEDRGSVSNYRLSEIKPLHNFLTQLQPFLKLKQKQANLVLKIIERLPSAKESPDKFLEVCTWVDQIAALNDSKTRKTTSETVRAVLDSLSEKKKSSPAAD

SEQ ID NO: 524 - protein, 167 aa, Artificial
  Table xxxxiii HSV_9.5 / HSV_9.3 cleaving variant 3
MANTKYNKEFLLYLAGFVDGDGSIIAQIKPNQTRKFKHQLSLTFVVTQKTQRRWFLDKLVDEIGVGYVEDRGSVSNYRLSKIKPLHNFLTQLQPFLKLKQKQANLVLKIIERLPSAKESPDKFLEVCTWVDQIAALNDSKTRKTTSETVRAVLDSLSEKKKSSPAAD

SEQ ID NO: 525 - protein, 167 aa, Artificial
  Table xxxxiii HSV_9.5 / HSV_9.3 cleaving variant 4
MANTKYNKEFLLYLAGFVDGDGSIIAQIKPNQSYKFKHQLKLTFQVTQKTQRRWFLDKLVDEIGVGYVRDRGSVSDYILSEIKPLHNFLTQLQPFLKLKQKQANLVLKIIERLPSAKESPDKFLEVCTWVDQIAALNDSKTRKTTSETVRAVLDSLSEKKKSSPAAD

SEQ ID NO: 526 - protein, 167 aa, Artificial
  Table xxxxiii HSV_9.5 / HSV_9.3 cleaving variant 5
MANTKYNKEFLLYLAGFVDGDGSIIAQIKPNQSYKFKHQLSLTFNVTQKTQRRWFLDKLVDEIGVGYVEDSGSVSRYRLSEIKPLHNFLTQLQPFLKLKQKQANLVLKIIERLPSAKESPDKFLEVCTWVDQIAALNDSKTRKTTSETVRAVLDSLSEKKKSSPAAD

SEQ ID NO: 527 - protein, 167 aa, Artificial
  Table xxxxiii HSV_9.5 / HSV_9.3 cleaving variant 6
MANTKYNKEFLLYLAGFVDGDGSIIAQIKPNQGYKFKHQLSLTFVVTQKTQRRWFLDKLVDEIGVGYVEDRGSVSNYRLSKIKPLHNFLTQLQPFLKLKQKQANLVLKIIERLPSAKESPDKFLEVCTWVDQIAALNDSKTRKTTSETVRAVLDSLSEKKKSSPAAD

SEQ ID NO: 528 - protein, 167 aa, Artificial
  Table xxxxiii HSV_9.6 / HSV_9.4 cleaving variant 1
MANTKYNKEFLLYLAGFVDGDGSIIAQIKPRQSYKFKHELSLTFQVTQKTQRRWFLDKLVDEIGVGYVYDSGSVSRYQLSEIKPLHNFLTQLQPFLKLKQKQANLVLKIIERLPSAKESPDKFLEVCTWVDQIAALNDSKTRKTTSETVRAVLDSLSEKKKSSPAAD

SEQ ID NO: 529 - protein, 167 aa, Artificial
  Table xxxxiii HSV_9.6 / HSV_9.4 cleaving variant 2
MANTKYNKEFLLYLAGFVDGDGSIIAQIKPRQSYKFKHELSLTFKVTQKTQRRWFLDKLVDGIGVGYVEDSGTVSNYRLSKIKPLHNFLTQLRPFLRLKQKQANLALKIIERLPSAKESPDKFLEVCTWVDQIAALNDSKTRKTTSETVRAVLDRLSEKKKSSPAAD

SEQ ID NO: 530 - protein, 167 aa, Artificial
  Table xxxxiii HSV_9.6 / HSV_9.4 cleaving variant 3
MANTKYNKEFLLYLAGFVDGDGSIIAQIKPRQSYKFKHELSLTFQVTQKTQRRWFLDKLVDEIGVGYVYDSGSVSNYRLSEIEPLHNFLTQLQPFLKLKQKQANLVLKIIERLPSAKESPDKFLEVCTWVDQIAALNDSKTRKTTSETVRAVLDSLSEKKKSSPAAD

SEQ ID NO: 531 - protein, 167 aa, Artificial
  Table xxxxiii HSV_9.6 / HSV_9.4 cleaving variant 4
MANTKYNKEFLLYLAGFVDGDGSIIAQIKPRQSYKFKHELSLTFQVTQKTQRRWFLDKLVDEIGVGYVNDSGSVSRYVLSEIKPLHNFLTQLQPFLKLKQKQANLVLKIIERLPSAKESPDKFLEVCTWVDQIAALNDSKTRKTTSETVRAVLDSLSEKKKSSPAAD

SEQ ID NO: 532 - protein, 354 aa, Artificial
  SCOH-HSV2-M1-MC-80K105A132VRev1
MANTKYNEEFLLYLAGFVDGDGSIIAQIKPRQSYKFKHQLSLTFDVTQKTQRRWFLDKLVDEIGVGYVTDRGSVSDYRLSKIKPLHNFLTQLQPFLELKQKQANLVLKIIEQLPSAKESPDKFLEVCTWVDQIAALNDSKTRKTTSETVRAVLDSLSEKKKSSPAAGGSDKYNQALSKYNQALSKYNQALSGGGGSNKKFLLYLAGFVDSDGSIIAQIEPNQSYKFKHRLKLTFKVTQKTQRRWILDKLVDRIGVGYVRDRGSVSDYILSKIKPLHNFLTQLQPFLKLKQKQANLALKIIEQLPSAKESPDKFLEVCTWVDQVAALNDSKTRKTTSETVRAVLDSLSEKKKSSP

SEQ ID NO: 533 - protein, 354 aa, Artificial
  SCOH-HSV2-M1-MC-80K105A132VRev1 (2)
MANTKYNEEFLLYLAGFVDGDGSIIAQIKPRQSYKFKHQLSLTFDVTQKTQRRWFLDKLVDEIGVGYVTDRGSVSDYRLSKIKPLHNFLTQLQPFLELKQKQANLVLKIIEQLPSAKESPDKFLEVCTWVDQIAALNDSKTRKTTSETVRAVLDSLSEKKKSSPAAGGSDKYNQALSKYNQALSKYNQALSGGGGSNKKFLLYLAGFVDSDGSIIAQIEPNQSYKFKHRLKLTFKVTQKTQRRWILDKLVDRIGVGYVRDSGSVSDYILSKIKPLHNFLTQLQPFLKLKQKQANLALKIIEQLPSAKESPDKFLEVCTWVDQVAALNDSKTRKTTSETVRAVLDSLSEKKKSSP

SEQ ID NO: 534 - protein, 354 aa, Artificial
  SCOH-HSV4-M2-105A-MF-80K132V
MANTKYNEEFLLYLAGFVDGDGSIIAQIKPRQSYKFKHQLSLTFMVTQKTQRRWFLDKLVDEIGVGYVRDAGSVSNYILSKIKPLHNFLTQLQPFLELKQKQANLALKIIEQLPSAKESPDKFLEVCTWVDQVAALNDSKTRKTTSKTVRAVLDSLGEKKKSSPAAGGSDKYNQALSKYNQALSKYNQALSGGGGSNKKFLLYLAGFVDSDGSIIAQIKPNQEYKFKHYLSLTFAVTQKTQRRWFLDKLVDRIGVGYVYDSGSVSYYKLSKIKPLHNFLTQLQPFLKLKQKQANLALKIIEQLPSAKESPDKFLEVCTWVDQVAALNDSKTRKTTSETVRAVLDSLSEKKKSSP

SEQ ID NO: 535 - protein, 354 aa, Artificial
  SCOH-HSV1-M5-132V-MF
MANTKYNEEFLLYLAGFVDGDGSIIAQIKPRQSGKFKHTLSLTFQVTQKTQRRWFLDKLVDEIGVGYVRDRGSVSDYILSEIKPLHNFLTQLQPFLELKQKQANLVLKIIEQLPSAKESPDKFLEVCTWVDQVAALNDSKTRKTTSETVRAVLDSLSEKKKSSPAAGGSDKYNQALSKYNQALSKYNQALSGGGGSNKKFLLYLAGFVDSDGSIIAQIKPGQSYKFKHRLSLTFKVTQKTQRRWFLDELVDEIGVGYVRDRGSVSDYILSEIKPLHNFLTQLQPFLKLKQKQANLVLKVIWQLPSAKESPDKFLEVCTWVDQVAALNDSKTRKTTSETVRAVLDSLSEKKKSSP

SEQ ID NO: 536 - DNA, 25 bp, Artificial
  gB Forward primer
agaaagcccccattggccaggtagt

SEQ ID NO: 537 - DNA, 27 bp, Artificial
  gB Reverse primer
attctcttccgacgccatatccaccac

SEQ ID NO: 538 - DNA, 25 bp, Artificial
  GAPDH Forward primer
ggcagaacccgggtttataactgtc

SEQ ID NO: 539 - DNA, 20 bp, Artificial
  GAPDH reverse primer
ccagtcctggatgagaaagg

SEQ ID NO: 540 - DNA, 50 bp, Artificial
  HSV_1 target oligo
tggcatacaagtttatgggacgtcgtaagggggcctggcaatcgtctgtc

SEQ ID NO: 541 - protein, 167 aa, Artificial
  Table xxxvii HSV_1.5 / HSV_1.3 cleaving variant 1
MANTKYNKEFLLYLAGFVDGDGSIIAQIKPRQSGKFKHTLSLTFQVTQKTQRRWFLDKLVDEIGVGYVRDRGSVSNYILSEIKPLHNFLTQLQPFLKLKQKQANLVLKIIEHLPSAKESPDKFLEVCTWVDQIAALNDSKTRKTTSETVRAVLDSLSEKKKSSPAAD

SEQ ID NO: 542 - protein, 167 aa, Artificial
  Table xxxvii HSV_1.5 / HSV_1.3 cleaving variant 2
MANTKYNKEFLLYLAGFVDGDGSIIAQIKPRQSGKFKHTLSLTFQVTQKTRRRWFLDKLVDEIGVGYVRDRGSVSNYILSEIKPLHNFLTQLQPFLKLKQKQANLVLKIIERLPSAKESPDKFLEVCTWVDQIAALNDSKTRKTTSETVRAVLDSLSEKKKSSPAAD

SEQ ID NO: 543 - protein, 167 aa, Artificial
  Table xxxvii HSV_1.5 / HSV_1.3 cleaving variant 3
MANTKYNKEFLLYLAGFVDGDGSIIAQIEPNQSRKFKHRLKLTFQVTQKTQRRWFLDKLVDEIGVGYVRDRGSVSNYILSEIKPLHNFLTQLQPFLKLKQKQANLVLKIIERLPSAKESPDKFLEVCTWVDQIAALNDSKTRKTTSETVRAVLDSLSEKKKSSPAAD

SEQ ID NO: 544 - protein, 167 aa, Artificial
  Table xxxvii HSV_1.5 / HSV_1.3 cleaving variant 4
MANTKYNKEFLLYLAGFVDGDGSIIAQIKPRQSGKFKHTLSLTFQVTQKTQRRWFLDKLVDEIGVGYVRDRGSVSDYILSEIKPLHNFLTQLQPFLKLKQKQANLVLKIIERLPSAKESPDKLLEVCTWVDQIAALNDSKTRKTTSETVRAVLDSLSEKKKSSPAAD

SEQ ID NO: 545 - protein, 167 aa, Artificial
  Table xxxvii HSV_1.5 / HSV_1.3 cleaving variant 5
MANTKYNKEFLLYLAGFVDGDGSIIAQIKPRQSGKFKHTLSLTFQVTQKTQRRWFLDKLVDEIGVGYVRDRGSVSDYILSEIKPLHNFLTQLQPFLKLKQKQANLVPKIIERLPSAKESPDKFLEVCTWVDQIAALNDSKTRKTTSETVRAVLDSLSEKKKSSPAAD

SEQ ID NO: 546 - protein, 167 aa, Artificial
  Table xxxvii HSV_1.5 / HSV_1.3 cleaving variant 6
MANTKYNKEFLLYLAGFVDGDGSIIAQIKPRQSGKFKHTLSLTFQVTQKTQRRWLLDKLVDEIGVGYVRDRGSVSNYILSEIKPLHNFLTQLQPFLKLKQKQANLVLKIIERLPSAKESPDKFLEVCTWVDQIAALNDSKTRKTTSETVRAVLDSLSEKKKSSPAAD

SEQ ID NO: 547 - protein, 167 aa, Artificial
  Table xxxvii HSV_1.5 / HSV_1.3 cleaving variant 7
MANTKYNEEFLLYLAGFVDGDGSIIAQIKPRQSGKFKHTLSLTFQVTQKTQRRWFLDKLVDEIGVGYVRDRGPVSNYILSEIKPLHNFLTQLQPFLKLKQKQANLALKIIERLPSAKESPDKFLEVCTWVDQIAALNDSKTRKTTSETVRAVLDSLSEKKKSSPAAD

SEQ ID NO: 548 - protein, 167 aa, Artificial
  Table xxxvii HSV_1.5 / HSV_1.3 cleaving variant 8
MANTKYNKEFLLYLAGFVDGDGSIIAQIKPRQSGKFKHTLSLTFQVTQKTQRRWLLDKLVDEIGVGYVRDRGSVSNYILSEIKPLHNFLTQLQSFLKLKQKQANLVLKIIERLPSAKESPDKFLEVCTWVDQIAALNDSKTRKTTSETVRAVLDSLSGKKKSSPAAD

SEQ ID NO: 549 - protein, 167 aa, Artificial
  Table xxxvii HSV_1.6 / HSV_1.4 cleaving variant 1
MANTKYNKEFLLYLAGFVDGDGSIIAQIKPGQSYKFKHRLSLTFKVTQKTQRRWFLDKLVDEIGVGYVRDEGSVSNYILSEIKPLHNFLTQLQPFLELKQKQANLVLKIIERLPSAKESPDKFLEVCTWVDQIAALNDSKTRKTTSETVRAVLDSLSEKKKSSPAAD

SEQ ID NO: 550 - protein, 167 aa, Artificial
  Table xxxvii HSV_1.6 / HSV_1.4 cleaving variant 2
MANTKYNKEFLLYLAGFVDGDGSIIAQIKPGQSYKFKHRLSLTFKVTQKTQRRWFLDKLVDEIGVGYVRDDGSVSNYILSEIKPLHNFLTQLQPFLKLKQKQANLVLKIIERLPSAKESPDKFLEVCTWVDQIAALNDSKTRKTTSETVRAVLDSLSEKKKSSPAAD

SEQ ID NO: 551 - protein, 167 aa, Artificial
  Table xxxvii HSV_1.6 / HSV_1.4 cleaving variant 3
MANTKYNKEFLLYLAGFVDGDGSIIAQIKSGQSYKFKHRLSLTFKVTQKTQRRWFLDKLVDEIGVGYVRDDGSVSNYILSEIKPLHNFLTQLQPFLKLKQKQANLVLKIIERLPSAKESPDKFLEVCTWVDQIAALNDSKTRKTTSETVRAVLDSLSEKKKSSPAAD

SEQ ID NO: 552 - protein, 167 aa, Artificial
  Table xxxvii HSV_1.6 / HSV_1.4 cleaving variant 4
MANTKYNKEYLLYLAGFVDGDGSIIAQIKPGQSYKFKHRLSLTFKVTQKTQRRWFLDKLVDEIGVGYVRDEGSVSNYILSEIKPLHNFLTQLQPFLKLKQKQANLVLKIIERLPSAKESPDKFLEVCTWVDQIAALNDSKTRKTTSETVRAVLDSLSEKKKSSPAAD

SEQ ID NO: 553 - protein, 167 aa, Artificial
  Table xxxvii HSV_1.6 / HSV_1.4 cleaving variant 5
MANTKYNKEFLLYLAGFVDGDGSIIAQIKPGQSYKFKHRLSLTFKVTQKTQRRWFLDKLVDEIGVGYVRDEGSVSNYILSEIKPLHNFLTQLQPFLKLKQKQANLVLKIIERLPSAKESPDKFLEVCTWVDQIAALNDSKTRKTTSETVRAVLDSLSEKKKSSPAAD

SEQ ID NO: 554 - protein, 167 aa, Artificial
  Table xxxvii HSV_1.6 / HSV_1.4 cleaving variant 6
MANTKYNKEFLLYLAGFVDGDGSIIAQIKPGQSYKFKHRLSLTFKVTQKTQRRWFLDELVDEIGVGYVRDEGSVSNYILSEIKPLHNFLTQLQPFLKLKQKQANLVLKVIWRLPSAKESPDKFLEVCTWVDQIAALNDSKTRKTTSETVRAVLDSLSEKKKSSPAAD

SEQ ID NO: 555 - DNA, 51 bp, Artificial
  HSV_1 target + gateway seqs
tggcatacaagtttatgggacgtcgtaagggggcctggcaatcgtctgtca

SEQ ID NO: 556 - protein, 354 aa, Artificial
  SCOH-HSV1-M5-MF
MANTKYNEEFLLYLAGFVDGDGSIIAQIKPRQSGKFKHTLSLTFQVTQKTQRRWFLDKLVDEIGVGYVRDRGSVSDYILSEIKPLHNFLTQLQPFLELKQKQANLVPKIIEQLPSAKESPDKFLEVCTWVDQIAALNDSKTRKTTSETVRAVLDSLSEKKKSSPAAGGSDKYNQALSKYNQALSKYNQALSGGGGSNKKFLLYLAGFVDSDGSIIAQIKPGQSYKFKHRLSLTFKVTQKTQRRWFLDELVDRIGVGYVRDEGSVSNYILSEIKPLHNFLTQLQPFLKLKQKQANLVLKVIEQLPSAKESPDKFLEVCTWVDQIAALNDSKTRKTTSETVRAVLDSLSEKKKSSP

SEQ ID NO: 557 - protein, 354 aa, Artificial
  SCOH-HSV1-M5-MF-132V
MANTKYNEEFLLYLAGFVDGDGSIIAQIKPRQSGKFKHTLSLTFQVTQKTQRRWFLDKLVDEIGVGYVRDRGSVSDYILSEIKPLHNFLTQLQPFLELKQKQANLVPKIIEQLPSAKESPDKFLEVCTWVDQIAALNDSKTRKTTSETVRAVLDSLSEKKKSSPAAGGSDKYNQALSKYNQALSKYNQALSGGGGSNKKFLLYLAGFVDSDGSIIAQIKPGQSYKFKHRLSLTFKVTQKTQRRWFLDELVDRIGVGYVRDEGSVSNYILSEIKPLHNFLTQLQPFLKLKQKQANLVLKVIEQLPSAKESPDKFLEVCTWVDQVAALNDSKTRKTTSETVRAVLDSLSEKKKSSP

SEQ ID NO: 558 - protein, 354 aa, Artificial
  SCOH-HSV1-M5-MF-80K105A
MANTKYNEEFLLYLAGFVDGDGSIIAQIKPRQSGKFKHTLSLTFQVTQKTQRRWFLDKLVDEIGVGYVRDRGSVSDYILSEIKPLHNFLTQLQPFLELKQKQANLVPKIIEQLPSAKESPDKFLEVCTWVDQIAALNDSKTRKTTSETVRAVLDSLSEKKKSSPAAGGSDKYNQALSKYNQALSKYNQALSGGGGSNKKFLLYLAGFVDSDGSIIAQIKPGQSYKFKHRLSLTFKVTQKTQRRWFLDELVDRIGVGYVRDEGSVSNYILSKIKPLHNFLTQLQPFLKLKQKQANLALKVIEQLPSAKESPDKFLEVCTWVDQIAALNDSKTRKTTSETVRAVLDSLSEKKKSSP

SEQ ID NO: 559 - protein, 354 aa, Artificial
  SCOH-HSV1-M5-MF-80K132V
MANTKYNEEFLLYLAGFVDGDGSIIAQIKPRQSGKFKHTLSLTFQVTQKTQRRWFLDKLVDEIGVGYVRDRGSVSDYILSEIKPLHNFLTQLQPFLELKQKQANLVPKIIEQLPSAKESPDKFLEVCTWVDQIAALNDSKTRKTTSETVRAVLDSLSEKKKSSPAAGGSDKYNQALSKYNQALSKYNQALSGGGGSNKKFLLYLAGFVDSDGSIIAQIKPGQSYKFKHRLSLTFKVTQKTQRRWFLDELVDRIGVGYVRDEGSVSNYILSKIKPLHNFLTQLQPFLKLKQKQANLVLKVIEQLPSAKESPDKFLEVCTWVDQVAALNDSKTRKTTSETVRAVLDSLSEKKKSSP

SEQ ID NO: 560 - protein, 354 aa, Artificial
  SCOH-HSV1-M5-MF-80K105A132V
MANTKYNEEFLLYLAGFVDGDGSIIAQIKPRQSGKFKHTLSLTFQVTQKTQRRWFLDKLVDEIGVGYVRDRGSVSDYILSEIKPLHNFLTQLQPFLELKQKQANLVPKIIEQLPSAKESPDKFLEVCTWVDQIAALNDSKTRKTTSETVRAVLDSLSEKKKSSPAAGGSDKYNQALSKYNQALSKYNQALSGGGGSNKKFLLYLAGFVDSDGSIIAQIKPGQSYKFKHRLSLTFKVTQKTQRRWFLDELVDRIGVGYVRDEGSVSNYILSKIKPLHNFLTQLQPFLKLKQKQANLALKVIEQLPSAKESPDKFLEVCTWVDQVAALNDSKTRKTTSETVRAVLDSLSEKKKSSP

SEQ ID NO: 561 - protein, 354 aa, Artificial
  SCOH-HSV1-M5-132V-MF
MANTKYNEEFLLYLAGFVDGDGSIIAQIKPRQSGKFKHTLSLTFQVTQKTQRRWFLDKLVDEIGVGYVRDRGSVSDYILSEIKPLHNFLTQLQPFLELKQKQANLVPKIIEQLPSAKESPDKFLEVCTWVDQVAALNDSKTRKTTSETVRAVLDSLSEKKKSSPAAGGSDKYNQALSKYNQALSKYNQALSGGGGSNKKFLLYLAGFVDSDGSIIAQIKPGQSYKFKHRLSLTFKVTQKTQRRWFLDELVDRIGVGYVRDEGSVSNYILSEIKPLHNFLTQLQPFLKLKQKQANLVLKVIEQLPSAKESPDKFLEVCTWVDQIAALNDSKTRKTTSETVRAVLDSLSEKKKSSP

SEQ ID NO: 562 - protein, 354 aa, Artificial
  SCOH-HSV1-M5-132V-MF-132V
MANTKYNEEFLLYLAGFVDGDGSIIAQIKPRQSGKFKHTLSLTFQVTQKTQRRWFLDKLVDEIGVGYVRDRGSVSDYILSEIKPLHNFLTQLQPFLELKQKQANLVPKIIEQLPSAKESPDKFLEVCTWVDQVAALNDSKTRKTTSETVRAVLDSLSEKKKSSPAAGGSDKYNQALSKYNQALSKYNQALSGGGGSNKKFLLYLAGFVDSDGSIIAQIKPGQSYKFKHRLSLTFKVTQKTQRRWFLDELVDRIGVGYVRDEGSVSNYILSEIKPLHNFLTQLQPFLKLKQKQANLVLKVIEQLPSAKESPDKFLEVCTWVDQVAALNDSKTRKTTSETVRAVLDSLSEKKKSSP

SEQ ID NO: 563 - protein, 354 aa, Artificial
  SCOH-HSV1-M5-80K105A-MF
MANTKYNEEFLLYLAGFVDGDGSIIAQIKPRQSGKFKHTLSLTFQVTQKTQRRWFLDKLVDEIGVGYVRDRGSVSDYILSKIKPLHNFLTQLQPFLELKQKQANLAPKIIEQLPSAKESPDKFLEVCTWVDQIAALNDSKTRKTTSETVRAVLDSLSEKKKSSPAAGGSDKYNQALSKYNQALSKYNQALSGGGGSNKKFLLYLAGFVDSDGSIIAQIKPGQSYKFKHRLSLTFKVTQKTQRRWFLDELVDRIGVGYVRDEGSVSNYILSEIKPLHNFLTQLQPFLKLKQKQANLVLKVIEQLPSAKESPDKFLEVCTWVDQIAALNDSKTRKTTSETVRAVLDSLSEKKKSSP

SEQ ID NO: 564 - protein, 354 aa, Artificial
  SCOH-HSV1-M5-80K132V-MF
MANTKYNEEFLLYLAGFVDGDGSIIAQIKPRQSGKFKHTLSLTFQVTQKTQRRWFLDKLVDEIGVGYVRDRGSVSDYILSKIKPLHNFLTQLQPFLELKQKQANLVPKIIEQLPSAKESPDKFLEVCTWVDQVAALNDSKTRKTTSETVRAVLDSLSEKKKSSPAAGGSDKYNQALSKYNQALSKYNQALSGGGGSNKKFLLYLAGFVDSDGSIIAQIKPGQSYKFKHRLSLTFKVTQKTQRRWFLDELVDRIGVGYVRDEGSVSNYILSEIKPLHNFLTQLQPFLKLKQKQANLVLKVIEQLPSAKESPDKFLEVCTWVDQIAALNDSKTRKTTSETVRAVLDSLSEKKKSSP

SEQ ID NO: 565 - protein, 354 aa, Artificial
  SCOH-HSV1-M5-80K132V-MF-105A
MANTKYNEEFLLYLAGFVDGDGSIIAQIKPRQSGKFKHTLSLTFQVTQKTQRRWFLDKLVDEIGVGYVRDRGSVSDYILSKIKPLHNFLTQLQPFLELKQKQANLVPKIIEQLPSAKESPDKFLEVCTWVDQVAALNDSKTRKTTSETVRAVLDSLSEKKKSSPAAGGSDKYNQALSKYNQALSKYNQALSGGGGSNKKFLLYLAGFVDSDGSIIAQIKPGQSYKFKHRLSLTFKVTQKTQRRWFLDELVDRIGVGYVRDEGSVSNYILSEIKPLHNFLTQLQPFLKLKQKQANLALKVIEQLPSAKESPDKFLEVCTWVDQIAALNDSKTRKTTSETVRAVLDSLSEKKKSSP

SEQ ID NO: 566 - protein, 354 aa, Artificial
  SCOH-HSV1-M5-80K132V-MF-132V
MANTKYNEEFLLYLAGFVDGDGSIIAQIKPRQSGKFKHTLSLTFQVTQKTQRRWFLDKLVDEIGVGYVRDRGSVSDYILSKIKPLHNFLTQLQPFLELKQKQANLVPKIIEQLPSAKESPDKFLEVCTWVDQVAALNDSKTRKTTSETVRAVLDSLSEKKKSSPAAGGSDKYNQALSKYNQALSKYNQALSGGGGSNKKFLLYLAGFVDSDGSIIAQIKPGQSYKFKHRLSLTFKVTQKTQRRWFLDELVDRIGVGYVRDEGSVSNYILSEIKPLHNFLTQLQPFLKLKQKQANLVLKVIEQLPSAKESPDKFLEVCTWVDQVAALNDSKTRKTTSETVRAVLDSLSEKKKSSP

SEQ ID NO: 567 - protein, 354 aa, Artificial
  SCOH-HSV1-M5-80K132V-MF-80K105A
MANTKYNEEFLLYLAGFVDGDGSIIAQIKPRQSGKFKHTLSLTFQVTQKTQRRWFLDKLVDEIGVGYVRDRGSVSDYILSKIKPLHNFLTQLQPFLELKQKQANLVPKIIEQLPSAKESPDKFLEVCTWVDQVAALNDSKTRKTTSETVRAVLDSLSEKKKSSPAAGGSDKYNQALSKYNQALSKYNQALSGGGGSNKKFLLYLAGFVDSDGSIIAQIKPGQSYKFKHRLSLTFKVTQKTQRRWFLDELVDRIGVGYVRDEGSVSNYILSKIKPLHNFLTQLQPFLKLKQKQANLALKVIEQLPSAKESPDKFLEVCTWVDQIAALNDSKTRKTTSETVRAVLDSLSEKKKSSP

SEQ ID NO: 568 - protein, 354 aa, Artificial
  SCOH-HSV1-M5-MFrev
MANTKYNEEFLLYLAGFVDGDGSIIAQIKPRQSGKFKHTLSLTFQVTQKTQRRWFLDKLVDEIGVGYVRDRGSVSDYILSEIKPLHNFLTQLQPFLELKQKQANLVPKIIEQLPSAKESPDKFLEVCTWVDQVAALNDSKTRKTTSETVRAVLDSLSEKKKSSPAAGGSDKYNQALSKYNQALSKYNQALSGGGGSNKKFLLYLAGFVDSDGSIIAQIKPGQSYKFKHRLSLTFKVTQKTQRRWFLDELVDRIGVGYVRDRGSVSDYILSEIKPLHNFLTQLQPFLKLKQKQANLVLKVIEQLPSAKESPDKFLEVCTWVDQIAALNDSKTRKTTSETVRAVLDSLSEKKKSSP

SEQ ID NO: 569 - DNA, 51 bp, Artificial
  HSV_8 target + gateway seqs
tggcatacaagtttccgctctgttttaccgcgtctacgcaatcgtctgtca

SEQ ID NO: 570 - DNA, 51 bp, Artificial; identical to SEQ ID NO: 569
  HSV_8 target + gateway seqs

SEQ ID NO: 571 - protein, 354 aa, Artificial
  SCOH-HSV8b1-A
MANTKYNEEFLLYLAGFVDGDGSIIAQIKPNQSHKFKHYLSLTFQVTQKTQRRWFLDKLVDEIGVGYVRDSGSVSHYYLSEIKPLHNFLTQLQPFLELKQKQANLVLKIIEQLPSAKESPDKFLEVCTWVDQIAALNDSKTRKTTSETVRAVLDSLSEKKKSSPAAGGSDKYNQALSKYNQALSKYNQALSGGGGSNKKFLLYLAGFVDSDGSIIAQIKPNQHCKFKHQLALTFQVTQKTQRRWFLDKLVDRIGVGYVRDSGSVSNYKLSEIKPLHNFLTQLQPFLKLKQKQANLVLKIIEQLPSAKESPDKFLEVCTWVDQIAALNDSKTRKTTSETVRAVLDSLSEKKKSSP

SEQ ID NO: 572 - protein, 354 aa, Artificial
  SCOH-HSV8b1-B
MANTKYNEEFLLYLAGFVDGDGSIIAQIKPNQSHKFKHYLSLTFQVTQKTQRRWFLDKLVDEIGVGYVRDSGSVSHYYLSEIKPLHNFLTQLQPFLELKQKQANLVLKIIEQLPSAKESPDKFLEVCTWVDQVAALNDSKTRKTTSETVRAVLDSLSEKKKSSPAAGGSDKYNQALSKYNQALSKYNQALSGGGGSNKKFLLYLAGFVDSDGSIIAQIKPNQHCKFKHQLALTFQVTQKTQRRWFLDKLVDRIGVGYVRDSGSVSNYKLSEIKPLHNFLTQLQPFLKLKQKQANLVLKIIEQLPSAKESPDKFLEVCTWVDQVAALNDSKTRKTTSETVRAVLDSLSEKKKSSP

SEQ ID NO: 573 - protein, 354 aa, Artificial
  SCOH-HSV8b1-C
MANTKYNEEFLLYLAGFVDGDGSIIAQIKPNQSHKFKHYLSLTFQVTQKTQRRWFLDKLVDEIGVGYVRDSGSVSHYYLSKIKPLHNFLTQLQPFLELKQKQANLVLKIIEQLPSAKESPDKFLEVCTWVDQVAALNDSKTRKTTSETVRAVLDSLSEKKKSSPAAGGSDKYNQALSKYNQALSKYNQALSGGGGSNKKFLLYLAGFVDSDGSIIAQIKPNQHCKFKHQLALTFQVTQKTQRRWFLDKLVDRIGVGYVRDSGSVSNYKLSEIKPLHNFLTQLQPFLKLKQKQANLALKIIEQLPSAKESPDKFLEVCTWVDQVAALNDSKTRKTTSETVRAVLDSLSEKKKSSP

SEQ ID NO: 574 - protein, 354 aa, Artificial
  SCOH-HSV8b1-E
MANTKYNEEFLLYLAGFVDGDGSIIAQIKPNQSHKFKHYLSLTFQVTQKTQRRWFLDKLVDEIGVGYVRDSGSVSHYYLSKIKPLHNFLTQLQPFLELKQKQANLALKIIEQLPSAKESPDKFLEVCTWVDQVAALNDSKTRKTTSETVRAVLDSLSEKKKSSPAAGGSDKYNQALSKYNQALSKYNQALSGGGGSNKKFLLYLAGFVDSDGSIIAQIKPNQHCKFKHQLALTFQVTQKTQRRWFLDKLVDRIGVGYVRDSGSVSNYKLSKIKPLHNFLTQLQPFLKLKQKQANLALKIIEQLPSAKESPDKFLEVCTWVDQVAALNDSKTRKTTSETVRAVLDSLSEKKKSSP

SEQ ID NO: 575 - protein, 354 aa, Artificial
  SCOH-HSV8b562-A
MANTKYNEEFLLYLAGFVDGDGSIIAQIKPKQSAKFKHQLSLTFQVTQKTQRRWFLDKLVDEIGVGYVRDSGSVSHYYLSEIKPLHNFLTQLQPFLELKQKQANLVLKIIEQLPSAKESPDKFLEVCTWVDQIAALNDSKTRKTTSETVRAVLDSLSEKKKSSPAAGGSDKYNQALSKYNQALSKYNQALSGGGGSNKKFLLYLAGFVDSDGSIIAQIKPNQHCKFKHQLALTFQVTQKTQRRWFLDKLVDRIGVGYVRDSGSVSNYKLSEIKPLHNFLTQLQPFLKLKQKQANLVLKIIEQLPSAKESPDKFLEVCTWVDQIAALNDSKTRKTTSETVRAVLDSLSEKKKSSP

SEQ ID NO: 576 - protein, 354 aa, Artificial
  SCOH-HSV8b562-B
MANTKYNEEFLLYLAGFVDGDGSIIAQIKPKQSAKFKHQLSLTFQVTQKTQRRWFLDKLVDEIGVGYVRDSGSVSHYYLSEIKPLHNFLTQLQPFLELKQKQANLVLKIIEQLPSAKESPDKFLEVCTWVDQVAALNDSKTRKTTSETVRAVLDSLSEKKKSSPAAGGSDKYNQALSKYNQALSKYNQALSGGGGSNKKFLLYLAGFVDSDGSIIAQIKPNQHCKFKHQLALTFQVTQKTQRRWFLDKLVDRIGVGYVRDSGSVSNYKLSEIKPLHNFLTQLQPFLKLKQKQANLVLKIIEQLPSAKESPDKFLEVCTWVDQVAALNDSKTRKTTSETVRAVLDSLSEKKKSSP

SEQ ID NO: 577 - protein, 354 aa, Artificial
  SCOH-HSV8b562-C
MANTKYNEEFLLYLAGFVDGDGSIIAQIKPKQSAKFKHQLSLTFQVTQKTQRRWFLDKLVDEIGVGYVRDSGSVSHYYLSKIKPLHNFLTQLQPFLELKQKQANLVLKIIEQLPSAKESPDKFLEVCTWVDQVAALNDSKTRKTTSETVRAVLDSLSEKKKSSPAAGGSDKYNQALSKYNQALSKYNQALSGGGGSNKKFLLYLAGFVDSDGSIIAQIKPNQHCKFKHQLALTFQVTQKTQRRWFLDKLVDRIGVGYVRDSGSVSNYKLSEIKPLHNFLTQLQPFLKLKQKQANLALKIIEQLPSAKESPDKFLEVCTWVDQVAALNDSKTRKTTSETVRAVLDSLSEKKKSSP

SEQ ID NO: 578 - protein, 354 aa, Artificial; identical to SEQ ID NO: 577
  SCOH-HSV8b562-E

SEQ ID NO: 579 - protein, 354 aa, Artificial
  SCOH-HSV8bu-A
MANTKYNEEFLLYLAGFVDGDGSIIAQIKPKQSRKFKHQLSLTFQVTQKTQRRWFLDKLVDEIGVGYVRDSGSVSHYYLSEIKPLHNFLTQLQPFLELKQKQANLVLKIIEQLPSAKESPDKFLEVCTWVDQIAALNDSKTRKTTSETVRAVLDSLSEKKKSSPAAGGSDKYNQALSKYNQALSKYNQALSGGGGSNKKFLLYLAGFVDSDGSIIAQIKPNQHCKFKHQLALTFRVTQKTQRRWFLDKLVDRIGVGYVYDSGSVSYYNLSEIKPLHNFLTQLQPFLKLKQKQANLVLKIIEQLPSAKESPDKFLEVCTWVDQIAALNDSKTRKTTSETVRAVLDSLSEKKKSSP

SEQ ID NO: 580 - protein, 354 aa, Artificial
  SCOH-HSV8bu-B
MANTKYNEEFLLYLAGFVDGDGSIIAQIKPKQSRKFKHQLSLTFQVTQKTQRRWFLDKLVDEIGVGYVRDSGSVSHYYLSEIKPLHNFLTQLQPFLELKQKQANLVLKIIEQLPSAKESPDKFLEVCTWVDQVAALNDSKTRKTTSETVRAVLDSLSEKKKSSPAAGGSDKYNQALSKYNQALSKYNQALSGGGGSNKKFLLYLAGFVDSDGSIIAQIKPNQHCKFKHQLALTFRVTQKTQRRWFLDKLVDRIGVGYVYDSGSVSYYNLSEIKPLHNFLTQLQPFLKLKQKQANLVLKIIEQLPSAKESPDKFLEVCTWVDQVAALNDSKTRKTTSETVRAVLDSLSEKKKSSP

SEQ ID NO: 581 - DNA, 51 bp, Artificial
  HSV_9 target + gateway seqs
tggcatacaagtttgcaagaccacgtaaggcaggggggcaatcgtctgtca

SEQ ID NO: 582 - DNA, 51 bp, Artificial; identical to SEQ ID NO: 581
  HSV_9 target + gateway seqs

SEQ ID NO: 583 - protein, 354 aa, Artificial
  SCOH-HSV9-b56-A
MANTKYNEEFLLYLAGFVDGDGSIIAQIKPGQSYKFKHRLSLTFIVTQKTQRRWFLDKLVDEIGVGYVEDRGSVSNYRLSKIKPLHNFLTQLQPFLELKQKQANLVLKIIEQLPSAKESPDKFLEVCTWVDQIAALNDSKTRKTTSETVRAVLDSLSEKKKSSPAAGGSDKYNQALSKYNQALSKYNQALSGGGGSNKKFLLYLAGFVDSDGSIIAQIKPRQSYKFKHELSLTFQVTQKTQRRWFLDKLVDRIGVGYVYDSGSVSRYQLSEIKPLHNFLTQLQPFLKLKQKQANLVLKIIEQLPSAKESPDKFLEVCTWVDQIAALNDSKTRKTTSETVRAVLDSLSEKKKSSP

SEQ ID NO: 584 - protein, 354 aa, Artificial
  SCOH-HSV9-b56-C
MANTKYNEEFLLYLAGFVDGDGSIIAQIKPGQSYKFKHRLSLTFIVTQKTQRRWFLDKLVDEIGVGYVEDRGSVSNYRLSKIKPLHNFLTQLQPFLELKQKQANLVLKIIEQLPSAKESPDKFLEVCTWVDQVAALNDSKTRKTTSETVRAVLDSLSEKKKSSPAAGGSDKYNQALSKYNQALSKYNQALSGGGGSNKKFLLYLAGFVDSDGSIIAQIKPRQSYKFKHELSLTFQVTQKTQRRWFLDKLVDRIGVGYVYDSGSVSRYQLSEIKPLHNFLTQLQPFLKLKQKQANLVLKIIEQLPSAKESPDKFLEVCTWVDQVAALNDSKTRKTTSETVRAVLDSLSEKKKSSP

SEQ ID NO: 585 - protein, 354 aa, Artificial
  SCOH-HSV9-b56-E
MANTKYNEEFLLYLAGFVDGDGSIIAQIKPGQSYKFKHRLSLTFIVTQKTQRRWFLDKLVDEIGVGYVEDRGSVSNYRLSKIKPLHNFLTQLQPFLELKQKQANLVLKIIEQLPSAKESPDKFLEVCTWVDQVAALNDSKTRKTTSETVRAVLDSLSEKKKSSPAAGGSDKYNQALSKYNQALSKYNQALSGGGGSNKKFLLYLAGFVDSDGSIIAQIKPRQSYKFKHELSLTFQVTQKTQRRWFLDKLVDRIGVGYVYDSGSVSRYQLSEIKPLHNFLTQLQPFLKLKQKQANLALKIIEQLPSAKESPDKFLEVCTWVDQVAALNDSKTRKTTSETVRAVLDSLSEKKKSSP

SEQ ID NO: 586 - protein, 354 aa, Artificial
  SCOH-HSV9-b56-F
MANTKYNEEFLLYLAGFVDGDGSIIAQIKPGQSYKFKHRLSLTFIVTQKTQRRWFLDKLVDEIGVGYVEDRGSVSNYRLSKIKPLHNFLTQLQPFLELKQKQANLALKIIEQLPSAKESPDKFLEVCTWVDQVAALNDSKTRKTTSETVRAVLDSLSEKKKSSPAAGGSDKYNQALSKYNQALSKYNQALSGGGGSNKKFLLYLAGFVDSDGSIIAQIKPRQSYKFKHELSLTFQVTQKTQRRWFLDKLVDRIGVGYVYDSGSVSRYQLSKIKPLHNFLTQLQPFLKLKQKQANLALKIIEQLPSAKESPDKFLEVCTWVDQVAALNDSKTRKTTSETVRAVLDSLSEKKKSSP

SEQ ID NO: 587 - protein, 354 aa, Artificial
  SCOH-HSV9-bu-A
MANTKYNEEFLLYLAGFVDGDGSIIAQIKPNQTRKFKHQLSLTFVVTQKTQRRWFLDKLVDEIGVGYVEDRGSVSNYRLSKIKPLHNFLTQLQPFLELKQKQANLVLKIIEQLPSAKESPDKFLEVCTWVDQIAALNDSKTRKTTSETVRAVLDSLSEKKKSSPAAGGSDKYNQALSKYNQALSKYNQALSGGGGSNKKFLLYLAGFVDSDGSIIAQIKPRQSYKFKHELSLTFQVTQKTQRRWFLDKLVDRIGVGYVYDSGSVSRYQLSEIKPLHNFLTQLQPFLKLKQKQANLVLKIIEQLPSAKESPDKFLEVCTWVDQIAALNDSKTRKTTSETVRAVLDSLSEKKKSSP

SEQ ID NO: 588 - protein, 354 aa, Artificial
  SCOH-HSV9-bu-C
MANTKYNEEFLLYLAGFVDGDGSIIAQIKPNQTRKFKHQLSLTFVVTQKTQRRWFLDKLVDEIGVGYVEDRGSVSNYRLSKIKPLHNFLTQLQPFLELKQKQANLVLKIIEQLPSAKESPDKFLEVCTWVDQVAALNDSKTRKTTSETVRAVLDSLSEKKKSSPAAGGSDKYNQALSKYNQALSKYNQALSGGGGSNKKFLLYLAGFVDSDGSIIAQIKPRQSYKFKHELSLTFQVTQKTQRRWFLDKLVDRIGVGYVYDSGSVSRYQLSEIKPLHNFLTQLQPFLKLKQKQANLVLKIIEQLPSAKESPDKFLEVCTWVDQVAALNDSKTRKTTSETVRAVLDSLSEKKKSSP

SEQ ID NO: 589 - protein, 354 aa, Artificial
  SCOH-HSV9-bu-E
MANTKYNEEFLLYLAGFVDGDGSIIAQIKPNQTRKFKHQLSLTFVVTQKTQRRWFLDKLVDEIGVGYVEDRGSVSNYRLSKIKPLHNFLTQLQPFLELKQKQANLVLKIIEQLPSAKESPDKFLEVCTWVDQVAALNDSKTRKTTSETVRAVLDSLSEKKKSSPAAGGSDKYNQALSKYNQALSKYNQALSGGGGSNKKFLLYLAGFVDSDGSIIAQIKPRQSYKFKHELSLTFQVTQKTQRRWFLDKLVDRIGVGYVYDSGSVSRYQLSEIKPLHNFLTQLQPFLKLKQKQANLALKIIEQLPSAKESPDKFLEVCTWVDQVAALNDSKTRKTTSETVRAVLDSLSEKKKSSP

SEQ ID NO: 590 - protein, 354 aa, Artificial
  SCOH-HSV9-bu-F
MANTKYNEEFLLYLAGFVDGDGSIIAQIKPNQTRKFKHQLSLTFVVTQKTQRRWFLDKLVDEIGVGYVEDRGSVSNYRLSKIKPLHNFLTQLQPFLELKQKQANLALKIIEQLPSAKESPDKFLEVCTWVDQVAALNDSKTRKTTSETVRAVLDSLSEKKKSSPAAGGSDKYNQALSKYNQALSKYNQALSGGGGSNKKFLLYLAGFVDSDGSIIAQIKPRQSYKFKHELSLTFQVTQKTQRRWFLDKLVDRIGVGYVYDSGSVSRYQLSKIKPLHNFLTQLQPFLKLKQKQANLALKIIEQLPSAKESPDKFLEVCTWVDQVAALNDSKTRKTTSETVRAVLDSLSEKKKSSP

SEQ ID NO: 591 - DNA, 51 bp, Artificial
  HSV_12 target + gateway seqs
tggcatacaagtttcctggacatggagacggggaacatcaatcgtctgtca

SEQ ID NO: 592 - protein, 167 aa, Artificial
  Table xxxxvi HSV_12.5 / hsv_12.3 cleaving variant 1
MANTKYNKEFLLYLAGFVDGDGSIVAQIKPNQSCKFKHSLSLTFIVTQKTQRRWLLDKLVDEIGVGYVRDSGSVSNYRLSEIKPLHNFLTQLQPFLKLKQKQANLVLKIIERLPSAKESPDKFLEVCTWVDQVAALNDSKTRKTTSETVRAVLDSLSEKKKSSPAAD

SEQ ID NO: 593 - protein, 167 aa, Artificial
  Table xxxxvi HSV_12.5 / hsv_12.3 cleaving variant 2
MANTKYNKEFLVYLAGFVDGDGSIVAQIKPNQSCKFKHSLSLTFIVTQKTRRRWFLDKLVDEIGVGYVRDSGSVSNYRLSEIKPLHNFLTQLQPFLKLKQKQANLVLKIIERLPSAKESPDKFLEVCTWVDQVAALNDSKTRKTTSETVRAVLDSLSEKKKSSPAAD

SEQ ID NO: 594 - protein, 167 aa, Artificial
  Table xxxxvi HSV_12.5 / hsv_12.3 cleaving variant 3
MANTKYNKEFLLYLAGFVDGDGSIVAQIKPNQSCKFKHSLSLTFIVTQKTQRRWLLDKLVDEIGVGYVRDSGSVSNYRLSEIKPLHNFLTQLQPFLKLKQKQANLVLKIIERLPSAKESPDKFLEVCTWADQIAALNDSKTRKTTSETVRAVLDSLSEKKRSSPAAD

SEQ ID NO: 595 - protein, 167 aa, Artificial
  Table xxxxvi HSV_12.5 / hsv_12.3 cleaving variant 4
MANTKYNKEFLLYLAGFVDGDGSIVAQIKPNQSCKFKHSLSLTFIVTQKTQRRWFLDKLVDEIGVGYVRDSGSVSNYRLSETKPLHNFLTQLQPFLKLKQKQANLVLKIIERLPSAKESPDKFLEVCTWVDQVAALNDSKTRKTTSETVRAVLDSLSEKKKSSPAAD

SEQ ID NO: 596 - protein, 167 aa, Artificial
  Table xxxxvi HSV_12.5 / hsv_12.3 cleaving variant 5
MANTKYNKEFLLYLAGFVDGDGSIVAQIKPNQSCKFKHSLSLTFIVTQKTQRRWFLDKLVDEIGVGYVRDSGSVSNYRLSKIKPLHNFLTQLRPFLKLKQKQANLVLKIIERLPSAKESPDKFLEVCTWVDQVAALNDSKTRKTTSETVRAVLDSLSEKKKSSPAAD

SEQ ID NO: 597 - protein, 167 aa, Artificial
  Table xxxxvi HSV_12.5 / hsv_12.3 cleaving variant 6
MANTKYNKEFLLYLAGFVDGDGSIVAQIKPNQSCKFKHSLSLTFIVTQKTRRRWFLDKLVDEIGVGYVRDSGSVSNYRLSEIKPLHNFLTQLQPFLKLKQKQANLVLKIIERLPSAKESPDKFLEVCTWVDQVAALNDSKTRKTTSETVRAVLDSLSEKKRSSPAAD

SEQ ID NO: 598 - protein, 167 aa, Artificial
  Table xxxxvi HSV_12.5 / hsv_12.3 cleaving variant 7
MANTKYNKEFLLYLAGFVDGDGSIVAQIKPNQSCKFKHSLSLTFIVTQKTRRRWFLDKLVDEIGVGYVRDSGSVSNYRLGEIKPLHNFLTQLQPFLKLKQKQANLVLKIIERLPSAKESPDKFLEVCTWVDQVAALNDSKTRKTTSETVRAVLDSLSEKKKSSPAAD

SEQ ID NO: 599 - protein, 167 aa, Artificial
  Table xxxxvi HSV_12.5 / hsv_12.3 cleaving variant 8
MANTKYNKEFLLYLAGFVDGDGSIVAQIKPNQSCKFKHSLSLTFIVTQKTRRRWFLDKLVDEIGVGYVRDSGSVSNYRLGEIKPLHNFLTQLQPFLKLKQKQANLALKIIERLPSAKESPDKFLEVCTWVDQIAALNDSKTRKTTSETVRAVLDSLSEKKKSSPAAD

SEQ ID NO: 600 - protein, 167 aa, Artificial
  Table xxxxvi HSV_12.6 / hsv_12.4 cleaving variant 1
MANTKYNKEFLLYLAGFVDGDGSIIAQIKPRQSSKFKHQLSLTFKVTQKTQRRWFLDKLVDEIGVGYVYDSGSVSDYTLSEIKPLHNFLTQLQPFLKLKQKQANLALKIIERLPSAKESPDKFLEVCTWVDQIAALNDSRTRKTTSETVRAVLASLSEKKKSSPAAD

SEQ ID NO: 601 - protein, 167 aa, Artificial
  Table xxxxvi HSV_12.6 / hsv_12.4 cleaving variant 2
MANTKYNKKFLLYLAGFVDGDGSIIAQIKPRQSSKFKHQLSLTFKVTQKTQRRWFLDKLVDEIGVGYVHDSGSVSDYTLSEIKPLHNFLTQLQPFLKLKQKQANLVLKIIERLPSAKESPDKFLEVCTWVDQIAALNDSRTRKTTSETVRAVLDSLSEKKESSPAAD

SEQ ID NO: 602 - protein, 167 aa, Artificial
  Table xxxxvi HSV_12.6 / hsv_12.4 cleaving variant 3
MANTKYNKKFLLYLAGFVDGDGSIIAQIKPRQSSKFKHQLSLTFKVTQKTQRRWFLDKLVDEIGVGHVYDSGSVSDYTLSEIRPLHNILTQLQPFLKLKQKQANLVLKIIERLPSAKESPDKFLEVCTWVDQIAALNDSRTRKTTSETVRAVLDSLSEKKKSSPAAD

SEQ ID NO: 603 - protein, 167 aa, Artificial
  Table xxxxvi HSV_12.6 / hsv_12.4 cleaving variant 4
MANTKYNKKFLLYLAGFVDGDGSIIAQIKPRQSSKFKHQLSLTFKVTQKTQRRWFLDKLVDEIGVGHVYDSGSVSDYTLSEIKPLHNILTQLQPFLKLKQKQANLVLKIIERLPSAKESPDKFLEVCTWVDQIAALNDSRTRKTTSETVRAVLDSLSEKKKSSPAAD

SEQ ID NO: 604 - protein, 167 aa, Artificial
  Table xxxxvi HSV_12.6 / hsv_12.4 cleaving variant 5
MANTKYNKKFLLYLAGFVDGDGSIIAQIKPRQSSKFKHQLSLTFKVTQKTQRRWFLDKLVDEIGVGHVYDSGSVSDYTLSEIKPLHNILTQLQPFLKLKQKQANLVLKIIERLPSAKESPDKFLEVCTWVDQIAALNDSRTRKTTSETVRAVLDSLSEKKKSSSAAD

SEQ ID NO: 605 - protein, 167 aa, Artificial
  Table xxxxvi HSV_12.6 / hsv_12.4 cleaving variant 6
MANTKYNKEFLLYLAGFVDGDGSIIAQIKPRQSSKFKHQLSLTFKVTQKTQRRWFLDKLVDEIGVGNVYDSGSVSDYTLSEIKPLHNFLTQLQPFLKLKQKQANLVLKIIERLPSAKESPDKFLEVCTWVDQIAALNDSRTRKTTSETVRAVLDSLSEKKKSSPAAD

SEQ ID NO: 606 - DNA, 51 bp, Artificial; identical to SEQ ID NO: 591
  HSV_12 target + cloning seqs

SEQ ID NO: 607 - protein, 354 aa, Artificial
  SCOH-HV12-M1-ME
MANTKYNEEFLLYLAGFVDGDGSIVAQIKPNQSCKFKHSLSLTFIVTQKTRRRWFLDKLVDEIGVGYVRDSGSVSNYRLSEIKPLHNFLTQLQPFLELKQKQANLVLKIIEQLPSAKESPDKFLEVCTWVDQVAALNDSKTRKTTSETVRAVLDSLSEKKKSSPAAGGSDKYNQALSKYNQALSKYNQALSGGGGSNKKFLLYLAGFVDSDGSIIAQIKPRQSSKFKHQLSLTFKVTQKTQRRWFLDKLVDRIGVGHVYDSGSVSDYTLSEIKPLHNILTQLQPFLKLKQKQANLVLKIIEQLPSAKESPDKFLEVCTWVDQIAALNDSRTRKTTSETVRAVLDSLSEKKKSSS

SEQ ID NO: 608 - protein, 354 aa, Artificial
  SCOH-HV12-M1-80K-ME
MANTKYNEEFLLYLAGFVDGDGSIVAQIKPNQSCKFKHSLSLTFIVTQKTRRRWFLDKLVDEIGVGYVRDSGSVSNYRLSKIKPLHNFLTQLQPFLELKQKQANLVLKIIEQLPSAKESPDKFLEVCTWVDQVAALNDSKTRKTTSETVRAVLDSLSEKKKSSPAAGGSDKYNQALSKYNQALSKYNQALSGGGGSNKKFLLYLAGFVDSDGSIIAQIKPRQSSKFKHQLSLTFKVTQKTQRRWFLDKLVDRIGVGHVYDSGSVSDYTLSEIKPLHNILTQLQPFLKLKQKQANLVLKIIEQLPSAKESPDKFLEVCTWVDQIAALNDSRTRKTTSETVRAVLDSLSEKKKSSS

SEQ ID NO: 609 - protein, 354 aa, Artificial
  SCOH-HV12-M1-80K-ME-132V
MANTKYNEEFLLYLAGFVDGDGSIVAQIKPNQSCKFKHSLSLTFIVTQKTRRRWFLDKLVDEIGVGYVRDSGSVSNYRLSKIKPLHNFLTQLQPFLELKQKQANLVLKIIEQLPSAKESPDKFLEVCTWVDQVAALNDSKTRKTTSETVRAVLDSLSEKKKSSPAAGGSDKYNQALSKYNQALSKYNQALSGGGGSNKKFLLYLAGFVDSDGSIIAQIKPRQSSKFKHQLSLTFKVTQKTQRRWFLDKLVDRIGVGHVYDSGSVSDYTLSEIKPLHNILTQLQPFLKLKQKQANLVLKIIEQLPSAKESPDKFLEVCTWVDQVAALNDSRTRKTTSETVRAVLDSLSEKKKSSS

SEQ ID NO: 610 - protein, 354 aa, Artificial
  SCOH-HV12-M1-105A-ME
MANTKYNEEFLLYLAGFVDGDGSIVAQIKPNQSCKFKHSLSLTFIVTQKTRRRWFLDKLVDEIGVGYVRDSGSVSNYRLSEIKPLHNFLTQLQPFLELKQKQANLALKIIEQLPSAKESPDKFLEVCTWVDQVAALNDSKTRKTTSETVRAVLDSLSEKKKSSPAAGGSDKYNQALSKYNQALSKYNQALSGGGGSNKKFLLYLAGFVDSDGSIIAQIKPRQSSKFKHQLSLTFKVTQKTQRRWFLDKLVDRIGVGHVYDSGSVSDYTLSEIKPLHNILTQLQPFLKLKQKQANLVLKIIEQLPSAKESPDKFLEVCTWVDQIAALNDSRTRKTTSETVRAVLDSLSEKKKSSS

SEQ ID NO: 611 - protein, 354 aa, Artificial
  SCOH-HV12-M1-105A-ME-80K132V
MANTKYNEEFLLYLAGFVDGDGSIVAQIKPNQSCKFKHSLSLTFIVTQKTRRRWFLDKLVDEIGVGYVRDSGSVSNYRLSEIKPLHNFLTQLQPFLELKQKQANLALKIIEQLPSAKESPDKFLEVCTWVDQVAALNDSKTRKTTSETVRAVLDSLSEKKKSSPAAGGSDKYNQALSKYNQALSKYNQALSGGGGSNKKFLLYLAGFVDSDGSIIAQIKPRQSSKFKHQLSLTFKVTQKTQRRWFLDKLVDRIGVGHVYDSGSVSDYTLSKIKPLHNILTQLQPFLKLKQKQANLVLKIIEQLPSAKESPDKFLEVCTWVDQVAALNDSRTRKTTSETVRAVLDSLSEKKKSSS

SEQ ID NO: 612 - protein, 354 aa, Artificial
  SCOH-HV12-M1-105A-ME-105A132V
MANTKYNEEFLLYLAGFVDGDGSIVAQIKPNQSCKFKHSLSLTFIVTQKTRRRWFLDKLVDEIGVGYVRDSGSVSNYRLSEIKPLHNFLTQLQPFLELKQKQANLALKIIEQLPSAKESPDKFLEVCTWVDQVAALNDSKTRKTTSETVRAVLDSLSEKKKSSPAAGGSDKYNQALSKYNQALSKYNQALSGGGGSNKKFLLYLAGFVDSDGSIIAQIKPRQSSKFKHQLSLTFKVTQKTQRRWFLDKLVDRIGVGHVYDSGSVSDYTLSEIKPLHNILTQLQPFLKLKQKQANLALKIIEQLPSAKESPDKFLEVCTWVDQVAALNDSRTRKTTSETVRAVLDSLSEKKKSSS

SEQ ID NO: 613 - DNA, 22 bp, artificial sequence
  10ATT_P target
cattacgtcgtacgacgtaatg

SEQ ID NO: 614 - DNA, 22 bp, artificial sequence
  5TGG_P target
caaaactgggtacccagttttg

SEQ ID NO: 615 - DNA, 22 bp, artificial sequence
  5CTT_P target
caaaaccttgtacaaggttttg

SEQ ID NO: 616 - DNA, 22 bp, artificial sequence
  HBV12 target
tattcttgggaacaagagctac

SEQ ID NO: 617 - DNA, 22 bp, artificial sequence
  HBV12.2 target
tattcttgggtacaagagctac

SEQ ID NO: 618 - DNA, 22 bp, artificial sequence
  HBV12.3 target
tattcttgggtacccaagaata

SEQ ID NO: 619 - DNA, 22 bp, artificial sequence
  HBV12.4 target
gtagctcttgtacaagagctac

SEQ ID NO: 620 - DNA, 51 bp, artificial sequence
  HBV12.3 target oligonucleotide
tggcatacaagtttatattcttgggtacccaagaatatcaatcgtctgtca

SEQ ID NO: 621 - protein, 167 aa, artificial sequence
  HBV12.3 I-CreI variant
MANTKYNKEFLLYLAGFVDGDGSIIAQIKPSQRSKFKHQLSLTFDVTQKTQRRWFLDKLVDEIGVGYVYDSGSVSSYRLSEIKPLHNFLTQLQPFLKLKQKQANLVLKIIEQLPSAKESPDKFLEVCTWVDQIAALNDSKTRKTTSETVRAVLDSLSEKKKSSPAAD

SEQ ID NO: 622 - protein, 167 aa, artificial sequence
  HBV12.3 I-CreI variant
MANTKYNKEFLLYLAGFVDGDGSIIAQIKPNQQYKFKHCLSLTFDVTQKTQRRWFLDKLVDEIGVGYVYDSGSVSSYRLSEIKPLHNFLTQLQPFLKLKQKQANLVLKIIEQLPSAKESPDKFLEVCTWVDQIAALNDSKTRKTTSETVRAVLDSLSEKKKSSPAAD

SEQ ID NO: 623 - protein, 167 aa, artificial sequence
  HBV12.3 I-CreI variant
MANTKYNKEFLLYLAGFVDGDGSIIAQIKPNQKTKFKHQLSLTFDVTQKTQRRWFLDKLVDEIGVGYVYDSGSVSSYRLSEIKPLHNFLTQLQPFLKLKQKQANLVLKIIEQLPSAKESPDKFLEVCTWVDQIAALNDSKTRKTTSETVRAVLDSLSEKKKSSPAAD

SEQ ID NO: 624 - protein, 167 aa, artificial sequence
  HBV12.3 I-CreI variant
MANTKYNKEFLLYLAGFVDGDGSIIAQIKPRQYSKFKHQLSLTFDVTQKTQRRWFLDKLVDEIGVGYVYDSGSVSSYRLSEIKPLHNFLTQLQPFLKLKQKQANLVLKIIEQLPSAKESPDKFLEVCTWVDQIAALNDSKTRKTTSETVRAVLDSLSEKKKSSPAAD

SEQ ID NO: 625 - protein, 167 aa, artificial sequence
  HBV12.3 I-CreI variant
MANTKYNKEFLLYLAGFVDGDGSIIAQIKPSQSNKFKHQLSLTFDVTQKTQRRWFLDKLVDEIGVGHVYDSGSVSSYRLSEIKPLHNFLTQLQPFLKLKQKQANLVLKIIEQLPSAKESPDKFLEVCTWVDQIAALNDSKTRKTTSETVRAVLDSLSEKKKSSPAAD

SEQ ID NO: 626 - protein, 167 aa, artificial sequence
  HBV12.3 I-CreI variant
MANTKYNKEFLLYLAGFVDGDGSIIAQIKPNQAAKFKHGLSLTFDVTQKTQRRWFLDKLVDEIGVGYVYDSGSVSSYRLSEIKPLHNFLAQLQPFLKLKQKQANLVLKIIEQLPSAKESPDKFLEVCTWVDQIAALNDSKTRKTTSETVRAVLDSLSEKKKSSPAAD

SEQ ID NO: 627 - DNA, 51 bp, artificial sequence
  HBV12.4 target oligonucleotide
tggcatacaagttttgtagctcttgtacaagagctacacaatcgtctgtca

SEQ ID NO: 628 - protein, 167 aa, artificial sequence
  HBV12.4 I-CreI variant
MANTKYNKEFLLYLAGFVDGDGSIIAQIKPNQHCKFKHQLSLTFRVTQKTQRRWFLDKLVDEIGVGYVYDSGSVSYYNLSEIKPLHNFLTQLQPFLKLKQKQANLVLKIIEQLPSAKESPDKFLEVCTWVDQIAALNDSKTRKTTSETVRAVLDSLSEKKKSSPAAD

SEQ ID NO: 629 - protein, 167 aa, artificial sequence
  HBV12.4 I-CreI variant
MANTKYNKEFLLYLAGFVDGDGSIIAQIKPNQHCKFKHQLSLTFRVTQKTQRRWFLDKLVDEIGVGYVYDSGSVSNYQLSEIKPLHNFLTQLQPFLKLKQKQANLVLKIIEQLPSAKKSPDKFLEVCTWVDQIAALNDSKTRKTTSETVRAVLDSLSEKKKSSPAAD

SEQ ID NO: 630 - protein, 167 aa, artificial sequence
  HBV12.4 I-CreI variant
MANTKYNKEFLLYLAGFVDGDGSIIAQIKPNQHCKFKHQLSLTFRVTQKTQRRWFLDKLVDEIGVGYVYDSGSVSNYQLSEIKPLHNFLTQLQPFLKLKQKQANLVLKIIEQLPSAKESPDKFLEVCTWVDQIAALNDSKTRKTTSETVRAVLDSLSEKKKSSPAAD

SEQ ID NO: 631 - protein, 167 aa, artificial sequence
  HBV12.4 I-CreI variant
MANTKYNKEFLLYLAGFVDGDGSIIAQIKPNQHCKFKHQLSLTFRVTQKTQRRWFLDKLVDEIGVGYVYDSGSVSNYNLSEIKPLHNFLTQLQPFLKLKQKQANLVLKIIEQLPSAKESPDKFLEVCTWVDQIAALNDSKTRKTTSETVRAVLDSLSEKKKSSPAAD

SEQ ID NO: 632 - protein, 167 aa, artificial sequence
  HBV12.4 I-CreI variant
MANTKYNKEFLLYLAGFVDGDGSIIAQIKPNQHCKFKHQLSLTFRVTQKTQRRWFLDKLVDEIGVGYVYDSGSVSDYQLSEIKPLHNFLTQLQPFLKLKQKQANLVLKIIEQLPSAKESPDKFLEVCTWVDQIAALNDSKTRKTTSETVRAALDSLSEKKKSSPAAD

SEQ ID NO: 633 - protein, 167 aa, artificial sequence
  HBV12.4 I-CreI variant
MANTKYNKEFLLYLAGFVDGDGSIIAQIKPNQHCKFKHQLSLTFRVTQKTQRRWFLDKLVDEIGVGYVYDSGSVSDYQLSEIKPLHNFLTQLQPFLKLKQKQANLVLKIIEQLPSAKESPDKFLEVCTWVDQIAALNDSKTRKTTSETVRAVLDSLSEKKKSSPAAD

SEQ ID NO: 634 - protein, 167 aa, artificial sequence
  HBV12.4 I-CreI variant
MANTKYNKEFLLYLAGFVDGDGSIIAQIKPNQNCKFKHQLSLTFRVTQKTQRRWFLDKLVDEIGVGYVYDSGSVSYYNLSEIKPLHNFLTQLQPFLKLKQKQANLVLKIIEQLPSAKESPDKFLEVCTWVDQIAALNDSKTRKTTSETVRAVLDSLSEKKKSSPAAD

SEQ ID NO: 635 - protein, 167 aa, artificial sequence
  HBV12 I-CreI variant
MANTKYNKEFLLYLAGFVDGDGSIFAQIKPNQQYKFKHCLSLTFDVTQKTQRRWFLDKLVDEIGVGYVYDSGSVSSYRLSEIKPLHNFLTQLQPFLKLKQKQANLVLKIIEQLPSAKESPDKFLEVCTWVDQIAALNDSKTRKTTSETVRAVLDSLSEKKKSSPAAD

SEQ ID NO: 636 - protein, 167 aa, artificial sequence
  HBV12 I-CreI variant
MANTKYNKEFLLYLAGFVDGDGSIIAQIKPRQYSKFKHQLSLTFDVTQKTQRRWFLDKLVDEIGAGYVYDSGSVSSYRLSEIKPLHNFLTQLQPFLKLKQKQANLVLKIIEQLPSAKESPDKFLEVCTWVDQIAALNDSKTRKTTSETVRAVLDSLSEKKKSSPAAD

SEQ ID NO: 637 - protein, 167 aa, artificial sequence
  HBV12 I-CreI variant
MANTKYNKEFLLYLAGFVDGDGSIIAQIKPSQHSKFKHQLSLTFDVTQKTQRRWFLDKLVDEIGVGYVYDSGSVSSYRLSEIKPLHNFLTQLQPFLKLKQKQANLVLKIIEQLPSAKESPDKFLEVCTWVDQIAALNDSKTRKTTSETVRAVLDSLSEKKKSSPAAD

SEQ ID NO: 638 - protein, 167 aa, artificial sequence
  HBV12 I-CreI variant
MANTKYNKEFLLYLAGFVDGDGSIIAQIKPSQRSKFKHQLSLTFDVTQKTQRRWFLDKLVDEIGVGYVYDSGPVSSYRLSEVKPLHNFLTQLQPFLKLKQKQANLVLKIIEQLPSAKESPDKFLEVCTWVDQIAALNDSKTRKTTSETVRAVLDSLSEKKKSSPAAD

SEQ ID NO: 639 - protein, 167 aa, artificial sequence
  HBV12 I-CreI variant
MANTKYNEEFLLYLAGFVDGDGSIIAQIKPSQRSKFKHQLSLTFDVTQKTQRRWFLDKLVDEIGVGYVYDSGSVSSYRLSEIKPLHNFLTQLQPFLKLKQKQANLVLKIIEQLPSAKESPDKFLEVCTWVDQIAALNDSKTRKTTSETVRAVLDSLSEKKKSSPAAD

SEQ ID NO: 640 - protein, 167 aa, artificial sequence
  HBV12 I-CreI variant
MANTKYNKEFLLYLAGFVDGDGSIIAQIKPSQRSKFKHQLSLTFDVTQKTQRRWFLDKLVDEIGVGYVYDSGSVSSYRLSEIKPLHNFLTQLQPFLKLKQKQANLVLRIIEQLPSAKESPDKFLEVCTWVDQIAALNDSKTRKTTSETVRAVLDSLSEKKKSSPAAD

SEQ ID NO: 641 - protein, 167 aa, artificial sequence
  HBV12 I-CreI variant
MANTKYNKEFLLYLAGFVDGDGSIIAQIKPSQRSKFKHQLSLTFDVTQKTQRRWFLDKLVDEIGVGYVYDSGSVSSYRLSEIKPLHNFLTQLQPFLKLKQKQANLVLKIIEQLPSAKESPDKFLEVCTWVDQIAALNDSKTRKTTSETVRAVLGSLSEKKKSSPAAD

SEQ ID NO: 642 - protein, 167 aa, artificial sequence
  HBV12 I-CreI variant
MANTKYNKEFLLYLAGFVDGDGSIIAQIKPSQRSKFKHQLSLTFDVTQKTQRRWFLDKLVDEIGVGYVYDSGSVSSYRLSETKPLHNFLTQLQPFLKLKQKQANLVLKIIEQLPSAKESPDKFLEVCTWVDQIAALNDSKTRKTTSETVRAVLDSLSEKKESSPAAD

SEQ ID NO: 643 - protein, 167 aa, artificial sequence
  HBV12 I-CreI variant
MANTKYNKEFLLYLAGFVDGDGSIIAQIKPSQRSKFKHQLSLTFDVTQKTQRRWFLDKLVDEIGVGYVYDSGSVSSYRLSEVKPLHNFLTQLQPFLKLKQKQANLVLKIIEQLPSAKESPDKFLEVCTWVDQIAALNDSKTRKTTSETVRAVLDSLSEKKKSPPAAD

SEQ ID NO: 644 - DNA, 33 bp, artificial sequence
  F54wtR primer
cactagtttgtccagaaaccaacggcgctgggt

SEQ ID NO: 645 - protein, 167 aa, artificial sequence
  HBV12 I-CreI variant
MANTKYNKEFLLYLAGFVDGDGSIIAQIKPSQRSKFKHQLSLTFDVTQKTQRRWFLDKLVDEIGVGYVYDSGSVSSYRLSEIKPLHNFLAQLQPFLKLKQKQANLVLKIIEQLPSAKESPDKFLEVCTWVDQIAALNDSKTRKTTSETVRAVLDSLSEKKKSSPAAD

SEQ ID NO: 646 - protein, 167 aa, artificial sequence
  HBV12 I-CreI variant
MANTKYNKEFLLYLAGFVDGDGSIIAQIKPSQRSKFKHQLSLTFDVTQKTQRRWFLDKLVDEIGVGYVYDSGSVSSYRLSEIKPLHNFLTQLQPFLKLKRKQANLVLKIIEQLPSAKESPDKFLEVCTWVDQIAALNDSKTRKTTSETVRAVLDSLSEKKKSSPAAD

SEQ ID NO: 647 - protein, 167 aa, artificial sequence
  HBV12 I-CreI variant
MANTKYNKEFLLYLAGFVDGDGSIIAQIKPNQGYKFKHGLSLTFDVTQKTQRRWFLDKLVDEIGAGYVYDSGSVSSYRLSEIKPLHNFLAQLQPFLKLKQKQANLVLKIIEQLPSAKESPDKFLEVCTWVDQIAALNDSKTRKTTSETVRAVLDSLSEKKKSSPAAD

SEQ ID NO: 648 - protein, 167 aa, artificial sequence
  HBV12 I-CreI variant
MANTKYNKEFLLYLAGFVDGDGSIIAQIKPNQGYKFKHGLSLTFDVTQKTQRRWFLDKLVDEIGVGYVYDSGSVSSYRLSEIKPLHNFLTQLQPFLKLKQKQANLVLKIIEQLPSAKESPDKFLEVCTWVDQIAALNDSKTRKTTSETVRAVLDSLSEKKKSSPAAD

SEQ ID NO: 649 - protein, 167 aa, artificial sequence
  HBV12 I-CreI variant
MANTKYNKEFLLYLAGFVDGDGSIIAQIKPNQGYKFKHGLSLTFDVTQKTQRRWFLDKLVDEIGVGYVYDSGSVSSYRLSETKPLHNFLTQLQPFLKLKQKQANLVLKIIEQLPSAKESPDKFLEVCTWVDQIAALNDSKTRKTTSETVRAVLDSLSEKKKSSPAAD

SEQ ID NO: 650 - protein, 167 aa, artificial sequence
  HBV12 I-CreI variant
MANTKYNKEFLLYLAGFVDGDGSIIAQIKPNQQYKFKHCLSLTFDVTQKTQRRWFLDKLVDEIGVGYVYDSGSVSSYRLSAIKPLHNFLTQLQPFLKLKQKQANLVLKIIEQLPSAKESPDKFLEVCTWVDQIAALNDSKTRKTTSETVRAVLDSLSEKKKSSPAAD

SEQ ID NO: 651 - protein, 167 aa, artificial sequence
  HBV12 I-CreI variant
MANTKYNKEFLLYLAGFVDGDGSIIAQIKPNQRSKFKHQLSLTFDVTQKTQRRWFLDKLVDEIGVGYVYDSGSVSSFRLSEIKPLHNFLTQLQPFLKLKQKQANLVLKIIEQLPSAKESPDKFLEVCTWVDQIAALNDSKTRKTTSETVRAVLDSLSEKKKSSPAAD

SEQ ID NO: 652 - protein, 167 aa, artificial sequence
  HBV12 I-CreI variant
MANTKYNKEFLLYLAGFVDGDGSIIAQIKPNQRYKFKHCLSLTFDVTQKTQRRWFLDKLVDEIGVGYVYDSGSVSSYRLSEIKPLHNFLTQLQPFLKLKQKQANLVLKIVEQLPSAKESPDKFLEVCTWVDQIAALNDSKTRKTTSETVRAVLDSLSKKKKSSPAAD

SEQ ID NO: 653 - DNA, 33 bp, artificial sequence
  G19SF primer
gccggctttgtggactctgacggtagcatcatc

SEQ ID NO: 654 - DNA, 33 bp, artificial sequence
  G19SR primer
gatgatgctaccgtcagagtccacaaagccggc

SEQ ID NO: 655 - DNA, 33 bp, artificial sequence
  F54LF primer
acccagcgccgttggctgctggacaaactagtg

SEQ ID NO: 656 - DNA, 33 bp, artificial sequence
  F54LR primer
cactagtttgtccagcagccaacggcgctgggt

SEQ ID NO: 657 - DNA, 33 bp, artificial sequence
  E80KF primer
ttaagcaaaatcaagccgctgcacaacttcctg

SEQ ID NO: 658 - DNA, 33 bp, artificial sequence
  E80KR primer
caggaagttgtgcagcggcttgattttgcttaa

SEQ ID NO: 659 - DNA, 33 bp, artificial sequence
  F87LF primer
aagccgctgcacaacctgctgactcaactgcag

SEQ ID NO: 660 - DNA, 33 bp, artificial sequence
  F87LR primer
ctgcagttgagtcagcaggttgtgcagcggctt

SEQ ID NO: 661 - DNA, 33 bp, artificial sequence
  V105AF primer
aaacaggcaaacctggctctgaaaattatcgaa

SEQ ID NO: 662 - DNA, 33 bp, artificial sequence
  V105AR primer
ttcgataattttcagagccaggtttgcctgttt

SEQ ID NO: 663 - DNA, 33 bp, artificial sequence
  I132VF primer
acctgggtggatcaggttgcagctctgaacgat

SEQ ID NO: 664 - DNA, 33 bp, artificial sequence
  I132VR primer
atcgttcagagctgcaacctgatccacccaggt

SEQ ID NO: 665 - protein, 167 aa, artificial sequence
  HBV12 I-CreI variant
MANTKYNKEFLLYLAGFVDGDGSIFAQIKPNQQYKFKHCLSLTFDVTQKTQRRWFLDKLVDEIGVGYVYDSGSVSSYRLSEIKPLHNLLTQLQPFLKLKQKQANLVLKIIEQLPSAKESPDKFLEVCTWVDQIAALNDSKTRKTTSETVRAVLGSLSEKKKSSPAAD

SEQ ID NO: 666 - protein, 167 aa, artificial sequence
  HBV12 I-CreI variant
MANTKYNKEFLLYLAGFVDGDGSIFAQIKPNQQYKFKHCLSLTFDVTQKTQRRWFLDKLVDEIGVGYVYDSGSVSSYRLSEIKPLHNFLTQLQPFLKLKQKQANLVLKIIEQLPSAKESPDKFLEVCTWVDQVAALNDSKTRKTTSETVRAVLDSLSEKKKSSPAAD

SEQ ID NO: 667 - protein, 167 aa, artificial sequence
  HBV12 I-CreI variant
MANTKYNKEFLLYLAGFVDSDGSIIAQIKPNQQYKFKHCLSLTFDVTQKTQRRWFLDKLVDEIGVGYVYDSGSVSSYRLSEVKPLHNFLTQLQPFLKLKQKQANLVLKIIEQLPSAKESPDKFLEVCTWVDQIAALNDSKTRKTTSETVRAVLDSLSEKKKSSPAAD

SEQ ID NO: 668 - protein, 167 aa, artificial sequence
  HBV12 I-CreI variant
MANTKYNEEFLLYLAGFVDGDGSIFAQIKPNQQYKFKHCLSLTFDVTQKTQRRWFLDKLVDEIGVGYVYDSGSVSSYRLSKIKPLHNFLTQLQPFLKLKQKQANLVLKIIEQLPSAKESPDKFLEVCTWVDQIAALNDSKTRKTTSETVRAVLDSLSEKKKSSPAAD

SEQ ID NO: 669 - protein, 167 aa, artificial sequence
  HBV12 I-CreI variant
MANTKYNKEFLLYLAGFVDGDGSIFAQIKPNQQYKFKHCLSLTFDVTQKTQRRWFLDKLVDEIGVGYVYDSGSVSSYRLSKIKPLHNFLTQLQPFLKLKQKQANLVLKIIEQLPSAKESPDKFLEVCTWVDQIAALNDSKTRKTTSETVRAVLDSLSEKKKSSPAAD

SEQ ID NO: 670 - protein, 167 aa, artificial sequence
  HBV12 I-CreI variant
MANTKYNKEFLLYLAGFVDGDGSIFAQIKPNQQYKFKHCLSLTFDVTQKTQRRWFLDKLVDEIGVGYVYDSGSVSSYRLSKIKPLHNFLTQLQPFLKLKQKQANLVLKIIEQLPSAKESPDKFLEVCTWVDQVAALNDSKTRKTTSETVRAVLDSLSEKKKSSPAAD

SEQ ID NO: 671 - protein, 167 aa, artificial sequence
  HBV12 I-CreI variant
MANTKYNKEFLLYLAGFVDGDGSIFAQIKPNQQYKFKHCLSLTFDVTQKTQRRWFLDKLVDEIGVGYVYDSGSVSSYRLSEIKPLHNFLTQLQPFLKLKQKQANLALKIIEQLPSAKESPDKFLEVCTWVDQVAALNDSKTRKTTSETVRAVLDSLSEKKKSSPAAD

SEQ ID NO: 672 - DNA, 33 bp, artificial sequence
  V105wtF primer
aaacaggcaaacctggttctgaaaattatcgaa

SEQ ID NO: 673 - protein, 167 aa, artificial sequence
  HBV12 I-CreI variant
MANTKYNKEFLLYLAGFVDGDGSIIAQIKPNQQYKFKHCLSLTFDVTQKTQRRWFLDKLVDEIGVGYVYDSGSVSSYRLSAIKPLHNFLTQLQPFLKLKQKQANLVLKIIEQLPSAKESPDKFLEVCTWVDQIAALNDSKTRKTTSETVRAVLGSLSEKKKSSPAAD

SEQ ID NO: 674 - protein, 167 aa, artificial sequence
  HBV12 I-CreI variant
MANTKYNKEFLLYLAGFVDGDGSIIAQIKPNQHCKFKHQLRLTFRVTQKTQRRWFLDKLVDEIGVGYVYDSGSVSNYQLSEIKPLHNFLTQLQPFLKLKQKQANLVLKIIEQLPSAKESPDKFLEVCTWVDQIAALNDSKTRKTTSETVRAVLDSLSEKKKSSPAAD

SEQ ID NO: 675 - protein, 167 aa, artificial sequence
  HBV12 I-CreI variant
MANTKYNKEFLLYLAGFVDSDGSIIAQIKPNQHCKFKHQLSLTFRVTQKTQRRWFLDKLVDEIGVGYVYDSGSVSDYRLSEIKPLHNFLTQLQPFLKLKQKQANLVLKIIEQLPSAKESPDKFLEVCTWVDQIAALNDSKTRKTTSETVRAVLDSLSEKKKSSPAAD

SEQ ID NO: 676 - protein, 167 aa, artificial sequence
  HBV12 I-CreI variant
MANTKYNKEFLLYLAGFVDGDGSIIAQIKPNQHCKFKHQLSLTFRVTQKTQRRWFLDKLVDEIGVGYVYDSGSVSYYQLSEIKPLHNLLTQLQPFLKLKQKQANLVLKIIEQLPSAKESPDKFLEVCTWVDQIAALNDSKTRKTTSETVRAVLDSLSEKKKSSPAAD

SEQ ID NO: 677 - DNA, 33 bp, artificial sequence
  I132wtR primer
atcgttcagagctgcaatctgatccacccaggt

SEQ ID NO: 678 - protein, 167 aa, artificial sequence
  HBV12 I-CreI variant
MANTKYNKEFLLYLAGFVDGDGSIIAQIKPNQHCKFKHQLSLTFRVTQKTQRRWFLDKLVDEIGVGYVYDSGSVSDYNLSKIKPLHNFLTQLQPFLKLKQKQANLVLKIIEQLPSAKESPDKFLEVCTWVDQIAALNDSKTRKTTSETVRAVLDSLSEKKKSSPAAD

SEQ ID NO: 679 - protein, 167 aa, artificial sequence
  HBV12 I-CreI variant
MANTKYNKEFLLYLAGFVDGDGSIIAQIKPNQHCKFKHQLSLTFRVTQKTQRRWFLDKLVDEIGVGYVYDSGSVSDYQLSEIKPLHNLLTQLQPFLKLKQKQANLALKIIEQLPSAKESPDKFLEVCTWVDQIAALNDSKTRKTTSETVRAALDSLSEKKKSSPAAD

SEQ ID NO: 680 - protein, 167 aa, artificial sequence
  HBV12 I-CreI variant
MANTKYNKEFLLYLAGFVDGDGSIIAQIKPNQHCKFKHQLSLTFRVTQKTQRRWLLDKLVDEIGVGYVYDSGSVSDYQLSEIKPLHNFLTQLQPFLKLKQKQANLVLKIIEQLPSAKESPDKFLEVCTWVDQIAALNDSKTRKTTSETVRAVLDSLSEKKKSSPAAD

SEQ ID NO: 681 - protein, 167 aa, artificial sequence
  HBV12 I-CreI variant
MANTKYNKEFLLYLAGFVDGDGSIIAQIKPNQHCKFKHQLSLTFRVTQKTQRRWFLDKLVDEIGVGYVYDSGSVSDYQLSEIKPLHNLLTQLQPFLKLKQKQANLVLKIIEQLPSAKKSPDKFLEVCTWVDQIAALNDSKTRKTTSETVRAVLDSLSEKKKSSPAAD

SEQ ID NO: 682 - DNA, 22 bp, artificial sequence
  10TGA_P target
ctgaacgtcgtacgacgttcag

SEQ ID NO: 683 - DNA, 22 bp, artificial sequence
  10CAA_P target
ccaaacgtcgtacgacgtttgg

SEQ ID NO: 684 - DNA, 22 bp, artificial sequence
  5TCT_P target
caaaactctgtacagagttttg

SEQ ID NO: 685 - DNA, 22 bp, artificial sequence
  HBV8 target
ttgacccttataaagaatttgg

SEQ ID NO: 686 - DNA, 22 bp, artificial sequence
  HBV8.2 target
ttgacccttgtacagaatttgg

SEQ ID NO: 687 - DNA, 22 bp, artificial sequence
  HBV8.3 target
ttgacccttgtacaagggtcaa

SEQ ID NO: 688 - DNA, 22 bp, artificial sequence
  HBV8.4 target
ccaaattctgtacagaatttgg

SEQ ID NO: 689 - DNA, 51 bp, artificial sequence
  HBV8.3 target oligonucleotide
tggcatacaagtttattgacccttgtacaagggtcaatcaatcgtctgtca

SEQ ID NO: 690 - protein, 167 aa, artificial sequence
  HBV8.3 I-CreI variant
MANTKYNKEFLLYLAGFVDGDGSIIAQIKPNQSAKFKHRLSLTFRVTQKTQRRWFLDKLVDEIGVGYVYDSGSVSDYNLSEIKPLHNFLTQLQPFLKLKQKQANLVLKIIEQLPSAKESPDKFLEVCTWVDQIAALNDSKTRKTTSETVRAVLDSLSEKKKSSPAAD

SEQ ID NO: 691 - protein, 167 aa, artificial sequence
  HBV8.3 I-CreI variant
MANTKYNKEFLLYLAGFVDGDGSIIAQIKPNQSCKFKHRLSLTFRVTQKTQRRWFLDKLVDEIGVGYVYDSGSVSDYNLSEIKPLHNFLTQLQPFLKLKQKQANLVLKIIEQLPSAKESPDKFLEVCTWVDQIAALNDSKTRKTTSETVRAVLDSLSEKKKSSPAAD

SEQ ID NO: 692 - protein, 167 aa, artificial sequence
  HBV8.3 I-CreI variant
MANTKYNKEFLLYLAGFVDGDGSIIAQIKPHQSCKFKHHLSLTFRVTQKTQRRWFLDKLVDEIGVGYVYDSGSVSYYNLSEIKPLHNFLTQLQPFLKLKQKQANLVLKIIEQLPSAKESPDKFLEVCTWVDQIAALNDSKTRKTTSETVRAVLDSLSEKKKSSPAAD

SEQ ID NO: 693 - protein, 167 aa, artificial sequence
  HBV8.3 I-CreI variant
MANTKYNKEFLLYLAGFVDGDGSIIAQIKPNQSAKFKHTLSLTFRVTQKTQRRWFLDKLVDEIGVGYVADYGSVSSYNLSEIKPLHNFLTQLQPFLKLKQKQANLVLKIIEQLPSAKESPDKFLEVCTWVDQIAALNDSKTRKTTSETVRAVLDSLSEKKKSSPAAD

SEQ ID NO: 694 - protein, 167 aa, artificial sequence
  HBV8.3 I-CreI variant
MANTKYNKEFLLYLAGFVDGDGSIIAQIKPNQRAKFKHQLSLTFRVTQKTQRRWFLDKLVDEIGVGYVTDSGSVSNYNLSEIKPLHNFLTQLQPFLKLKQKQANLVLKIIEQLPSAKESPDKFLEVCTWVDQIAALNDSKTRKTTSETVRAVLDSLSEEKKSSPAAD

SEQ ID NO: 695 - protein, 167 aa, artificial sequence
  HBV8.3 I-CreI variant
MANTKYNKEFLLYLAGFVDGDGSIIAQIKPNQSCKFKHSLSLTFRVTQKTQRRWFLDKLVDEIGVGYVYDSGSVSNYNLSEIKPLHNFLTQLQPFLKLKQKQANLVLKIIEQLPSAKESPDKFLEVCTWVDQIAALNDSKTRKTTSETVRAVLDSLSEKKKSFPAAD

SEQ ID NO: 696 - DNA, 51 bp, artificial sequence
  HBV8.4 target oligonucleotide
tggcatacaagttttccaaattctgtacagaatttggacaatcgtctgtca

SEQ ID NO: 697 - protein, 167 aa, artificial sequence
  HBV8.4 I-CreI variant
MANTKYNKEFLLYLAGFVDGDGSIIAQIKPNQSHKFKHQLQLTFQVTQKTQRRWFLDKLVDEIGVGYVRDSGSVSNYKLSEIKPLHNFLTQLQPFLKLKQKQANLVLKIIEQLPSAKESPDKFLEVCTWVDQIAALNDSKTRKTTSETVRAVLDSLSEKKKSSQAAD

SEQ ID NO: 698 - DNA, 39 bp, artificial sequence
  CreRevBsgI primer
caggtttgcctgtttctgtttcagtttcagaaacggctg

SEQ ID NO: 699 - protein, 167 aa, artificial sequence
  HBV8.4 I-CreI variant
MANTKYNKEFLLYLAGFVDGDGSIIAQIKPNQSHKFKHQLQLTFKVTQKTQRRWFLDKLVDEIGVGYVADSGSVSNYILSEIKPLHNFLTQLQPFLKLKQKQANLALKIIEQLPSAKESPDKFLEVCTWVDQVAALNDSKTRKTTSETVRAVLDSLSEKKKSSPAAD

SEQ ID NO: 700 - protein, 167 aa, artificial sequence
  HBV8.4 I-CreI variant
MANTKYNKEFLLYLAGFVDGDGSIIAQIKPNQSHKFKHQLQLTFKVTQKTQRRWFLDKLVDEIGVGYVNDAGSVSNYILSEIKPLHNFLTQLQPFLKLKQKQANLALKIIEQLPSAKESPDKFLEVCTWVDQVAALNDSKTRKTTSETVRAVLDSLSEKKKSSPAAD

SEQ ID NO: 701 - protein, 167 aa, artificial sequence
  HBV8.4 I-CreI variant
MANTKYNKEFLLYLAGFVDGDGSIIAQIKPNQEYKFKHQLSLTFQVTQKTQRRWFLDKLVDEIGVGYVADSGSVSNYRLSEIKPLHNFLTQLQPFLKLKQKQANLALKIIEQLPSAKESPDKFLEVCTWVDQVAALNDSKTRKTTSETVRAVLDSLSEKKKSSPAAD

SEQ ID NO: 702 - protein, 167 aa, artificial sequence
  HBV8.4 I-CreI variant
MANTKYNKEFLLYLAGFVDGDGSIIAQIKPNQEYKFKHQLSLTFQVTQKTQRRWFLDKLVDEIGVGYVSDSGSVSNYRLSEIKPLHNFLTQLQPFLKLKQKQANLALKIIEQLPSAKESPDKFLEVCTWVDQVAALNDSKTRKTTSETVRAVLDSLSEKKKSSPAAD

SEQ ID NO: 703 - DNA, 51 bp, artificial sequence
  HBV8 target oligonucleotide
tggcatacaagtttattgacccttataaagaatttggacaatcgtctgtca

SEQ ID NO: 704 - protein, 167 aa, artificial sequence
  HBV8.4 I-CreI variant
MANTKYNKEFLLYLAGFVDGDGSIIAQIKPNQSHKFKHQLQLTFQVTQKTQRRWFLDKLVDEIGVGYVRDSGSVSNYKLSEIKPLHNFLTQLQPFLKLKQKQANLVLKIIEQLPSAKESPDKFLEVCTWVDQIAALNDSKTRKTTSETVRAVLDSLSEKKKSSPAAD

SEQ ID NO: 705 - protein, 167 aa, artificial sequence
  HBV8 I-CreI variant
MANTKYNKEFLLYLAGFVDGDGSIIAQIKPNQSHKFKHQLQLTFQVTQKTQRRWFLDKLVDEIGVGYVRDSGSVSNYKLSEIKPLHNFLTQLQPFLKLKQKQANLALKIIEQLPSAKESPDKFLEVCTWVDQVAALNDSKTRKTTSETVRAVLDSLSEKKKSSPAAD

SEQ ID NO: 706 - protein, 167 aa, artificial sequence
  HBV8 I-CreI variant
MANTKYNKEFLLYLAGFVDGDGSIIAQIKPNQSHKFKHQLQLTFQVTQKTQRRWFLDKLVDEIGVGYVADSGSVSNYRLSEIKPLHNFLTQLQPFLKLKQKQANLALKIIEQLPSAKESPDKFLEVCTWVDQVAALNDSKTRKTTSETVRAVLDSLSEKKKSSPAAD

SEQ ID NO: 707 - protein, 167 aa, artificial sequence
  HBV8 I-CreI variant
MANTKYNKEFLLYLAGFVDGDGSIIAQIKPNQSHKFKHQLQLTFQVTQKTQRRWFLDKLVDEIGVGYVADSGSVSNYRLSEIKPLHNFLTQLQPFLKLKQKQANLVLKIIEQLPSAKESPDKFLEVCTWVDQVAALNDSKTRKTTSETVRAVLDSLSEKKKSSPAAD

SEQ ID NO: 708 - protein, 167 aa, artificial sequence
  HBV8 I-CreI variant
MANTKYNKEFLLYLAGFVDGDGSIIAQIKPNQSHKFKHQLQLTFQVTQKTQRRWFLDKLVDEIGVGYVRDSGSVSNYKLSEIKPLHNFLTQLQPFLKLKQKQANLVLKIIEQLPSAKESPDKFLEVCTWVDQVAALNDSKTRKTTSETVRAVLDSLSEKKKSSPAAD

SEQ ID NO: 709 - protein, 167 aa, artificial sequence
  HBV8 I-CreI variant
MANTKYNKEFLLYLAGFVDGDGSIIAQIKPNQSHKFKHQLQLTFQVTQKTQRRWFLDKLVDEIGVGYVSDSGSVSNYRLSEIKPLHNFLTQLQPFLKLKQKQANLALKIIEQLPSAKESPDKFLEVCTWVDQVAALNDSKTRKTTSETVRAVLDSLSEKKKSSPAAD

SEQ ID NO: 710 - protein, 167 aa, artificial sequence
  HBV8 I-CreI variant
MANTKYNKEFLLYLAGFVDGDGSIIAQIKPNQSHKFKHQLQLTFQVTQKTQRRWFLDKLVDEIGVGYVRDSGSVSNYKLSEIKPLHNFLTQLQPFLKLKQKQANLALKIIEQLPSAKESPDKFLEVCTWVDQIAALNDSKTRKTTSETVRAVLDSLSEKKKSSPAAD

SEQ ID NO: 711 - protein, 167 aa, artificial sequence
  HBV8 I-CreI variant
MANTKYNKEFLLYLAGFVDGDGSIIAQIKPNQSHKFKHQLQLTFQVTQKTQRRWFLDKLVDEIGVGYVADSGSVSNYRLSEIKPLHNFLTQLQPFLKLKQKQANLALKIIEQLPSAKESPDKFLEVCTWVDQIAALNDSKTRKTTSETVRAVLDSLSEKKKSSPAAD

SEQ ID NO: 712 - protein, 167 aa, artificial sequence
  HBV8 I-CreI variant
MANTKYNKEFLLYLAGFVDSDGSIIAQIKPNQSHKFKHQLQLTIQVTQKTQRRWFLDKLVDEIGVGYVRDSGSVSNYKLSEIKPLHNFLTQLQPFLKLKQKQANLALKIIEQLPSAKESPDKFLEVCTWVDQVAALNDSKTRKTTSETVRAVLDSLSEKKKSSPAAD

SEQ ID NO: 713 - protein, 167 aa, artificial sequence
  HBV8 I-CreI variant
MANTKYNKEFLLYLAGFVDSDGSIIAQIKPNQSHKFKHQLQLTFQVTQKTQRRWFLDKLVDEIGVGYVRDSGSVSNYKLSEIKPLHNFLTQLQPFLKLKQKQANLALKIIEQLPSAKESPDKFLEVCTWVDQVAALNDSKTRKTTSETVRAVLDSLSEKKKSSPAAD

SEQ ID NO: 714 - protein, 167 aa, artificial sequence
  HBV8 I-CreI variant
MANTKYNKEFLLYLAGFVDSDGSIIAQIKPNQSHKFKHQLQLTFQVTQKTQRRWFLDKLVDEIGVGYVRDSGSVSNYKLSEIKPLHNFLTQLQPFLKLKQKQANLALKIIEQLPSAKESPDKFLEVCTWVDQIAALNDSKTRKTTSETVRAVLDSLSEKKKSSPAAD

SEQ ID NO: 715 - protein, 167 aa, artificial sequence
  HBV8 I-CreI variant
MANTKYNKEFLLYLAGFVDSDGSIIAQIKPNQSHKFKHQLQLTFQVTQKTQRRWFLDKLVDEIGVGYVRDSGSVSNYKLSEIKPLHNFLTQLQPFLKLKQKQANLVLKIIEQLPSAKESPDKFLEVCTWVDQVAALNDSKTRKTTSETVRAVLDSLSEKKKSSPAAD

SEQ ID NO: 716 - DNA, 77 bp, artificial sequence; identical to SEQ ID NO: 434
  attB1-ICreIFor

SEQ ID NO: 717 - DNA, 64 bp, artificial sequence; identical to SEQ ID NO: 435
  attB2-ICreIRev

SEQ ID NO: 718 - DNA, 18 bp, artificial sequence
  I-SceI target
tagggataacagggtaat

SEQ ID NO: 719 - DNA, 22 bp, artificial sequence
  10TGC_P target
ctgcacgtcgtacgacgtgcag

SEQ ID NO: 720 - DNA, 22 bp, artificial sequence
  10TCT_P target
ctctacgtcgtacgacgtagag

SEQ ID NO: 721 - DNA, 22 bp, artificial sequence
  5TAC_P target
caaaactacgtacgtagttttg

SEQ ID NO: 722 - DNA, 22 bp, artificial sequence
  5TCC_P target
caaaactccgtacggagttttg

SEQ ID NO: 723 - DNA, 22 bp, artificial sequence
  HBV3 target
ctgccttacttttggaagagaa

SEQ ID NO: 724 - DNA, 22 bp, artificial sequence
  HBV3.2 target
ctgccttacgtacggaagagaa

SEQ ID NO: 725 - DNA, 22 bp, artificial sequence
  HBV3.3 target
ctgccttacgtacgtaaggcag

SEQ ID NO: 726 - DNA, 22 bp, artificial sequence
  HBV3.4 target
ttctcttccgtacggaagagaa

SEQ ID NO: 727 - DNA, 22 bp, artificial sequence
  HBV3.5 target
ctgccttacttttgtaaggcag

SEQ ID NO: 728 - DNA, 22 bp, artificial sequence
  HBV3.6 target
ttctcttccttttggaagagaa

SEQ ID NO: 729 - DNA, 51 bp, artificial sequence
  HBV3.3 target oligonucleotide
tggcatacaagtttcctgccttacgtacgtaaggcaggcaatcgtctgtca

SEQ ID NO: 730 - protein, 167 aa, artificial sequence
  HBV3.3 I-CreI variant
MANTKYNKEFLLYLAGFVDGDGSIIAQIKPNQSSKFKHRLHLTFNVTQKTQRRWFLDKLVDEIGVGYVYDSGSVSRYYLSEIKPLHNFLTQLQPFLKLKQKQANLVLKIIEQLPSAKESPDKFLEVCTWVDQIAALNDSKTRKTTSETVRAVLDSLSEKKKSSPAAD

SEQ ID NO: 731 - protein, 167 aa, artificial sequence
  HBV3.3 I-CreI variant
MANTKYNKEFLLYLAGFVDGDGSIIAQIKPNQSSKFKHRLSLTFAVTQKTQRRWFLDKLVDEIGVGYVYDSGSVSRYILSEIKPLHNFLTQLQPFLKLKQKQANLVLKIIEQLPSAKESPDKFLEVCTWVDQIAALNDSKTRKTTSETVRAVLDSLSEKKKSSPAAD

SEQ ID NO: 732 - protein, 167 aa, artificial sequence
  HBV3.3 I-CreI variant
MANTKYNKEFLLYLAGFVDGDGSIIAQIKPNQSCKFKHRLSLTFAVTQKTQRRWFLDKLVDEIGVGYVYDSGSVSRYTLSEIKPLHNFLTQLQPFLKLKQKQANLVLKIIEQLPSAKESPDKFLEVCTWVDQIAALNDSKTRKTTSETVRAVLDSLSEKKKSSPAAD

SEQ ID NO: 733 - protein, 167 aa, artificial sequence
  HBV3.3 I-CreI variant
MANTKYNKEFLLYLAGFVDGDGSIIAQIKPNQSSKFKHRLELTFNVTQKTQRRWFLDKLVDEIGVGYVYDSGSVSRYYLSEIKPLHNFLTQLQPFLKLKQKQANLVLKIIEQLPSAKESPDKFLEVCTWVDQIAALNDSKTRKTTSETVRAVLDSLSEKKKSSPAAD

SEQ ID NO: 734 - protein, 167 aa, artificial sequence
  HBV3.3 I-CreI variant
MANTKYNKEFLLYLAGFVDGDGSIIAQIKPNQSSKFKHRLQLTFNVTQKTQRRWFLDKLVDEIGVGYVYDSGSVSRYVLSEIKPLHNFLTQLQPFLKLKQKQANLVLKIIEQLPSAKESPDKFLEVCTWVDQIAALNDSKTRKTTSETVRAVLDSLSEKKKSSPAAD

SEQ ID NO: 735 - DNA, 51 bp, artificial sequence
  HBV3.4 target oligonucleotide
tggcatacaagttttttctcttccgtacgacgtaaagacaatcgtctgtca

SEQ ID NO: 736 - protein, 167 aa, artificial sequence
  HBV3.4 I-CreI variant
MANTKYNKEFLLYLAGFVDGDGSIIAQIKPNQSSKFKHYLSLTFKVTQKTQRRWFLDKLVDEIGVGYVHDNGSVSNYILSEIKPLHNFLTQLQPFLKLKQKQANLVLKIIEQLPSAKESPDKFLEVCTWVDQIAALNDSKTRKTTSETVRAVLDSLSEKKKSSPAAD

SEQ ID NO: 737 - protein, 167 aa, artificial sequence
  HBV3.4 I-CreI variant
MANTKYNKEFLLYLAGFVDGDGSIIAQIKPNQSSKFKHWLSLTFKVTQKTQRRWFLDKLVDEIGVGYVYDSGSVSNYQLSEIKPLHNFLTQLQPFLKLKQKQANLVLKIIEQLPSAKESPDKFLEVCTWVDQIAALNDSKTRKTTSETVRAVLDSLSEKKKSSPAAD

SEQ ID NO: 738 - protein, 167 aa, artificial sequence
  HBV3.4 I-CreI variant
MANTKYNKEFLLYLAGFVDGDGSIIAQIKPQQSAKFKHQLSLTFQVTQKTQRRWFLDKLVDEIGVGYVYDSGSVSYYRLSEIKPLHNFLTQLQPFLKLKQKQANLVLKIIEQLPSAKESPDKFLEVCTWVDQIAALNDSKTRKTTSETVRAVLDSLSEKKKSSPAAD

SEQ ID NO: 739 - protein, 167 aa, artificial sequence
  HBV3.4 I-CreI variant
MANTKYNKEFLLYLAGFVDGDGSIIAQIKPNQSCKFKHALSLTFKVTQKTQRRWFLDKLVDEIGVGYVYDSGSVSNYYLSEIKPLHNFLTQLQPFLKLKQKQANLVLKIIEQLPSAKESPDKFLEVCTWVDQIAALNDSKTRKTTSETVRAVLDSLSEKKKSSPAAD

SEQ ID NO: 740 - protein, 167 aa, artificial sequence
  HBV3.4 I-CreI variant
MANTKYNKEFLLYLAGFVDGDGSIIAQIKPNQSCKFKHCLSLTFKVTQKTQRRWFLDKLVDEIGVGYVYDSGSVSNYILSEIKPLHNFLTQLQPFLKLKQKQANLVLKIIEQLPSAKESPDKFLEVCTWVDQIAALNDSKTRKTTSETVRAVLDSLSEKKKSSPAAD

SEQ ID NO: 741 - DNA, 51 bp, artificial sequence
  HBV3.2 target oligonucleotide
tggcatacaagtttcctgccttacgtacggaagagaaacaatcgtctgtca

SEQ ID NO: 742 - DNA, 51 bp, artificial sequence
  HBV3 target oligonucleotide
tggcatacaagtttcctgccttacttttggaagagaaacaatcgtctgtca

SEQ ID NO: 743 - protein, 167 aa, artificial sequence
  HBV3.3 I-CreI variant
MANTKYNKEFLLYLAGFVDGDGSIIAQIKPNQSCKFKHSLSLTFNVTQKTQRRWFLDKLVDEIGVGYVYDSGSVSRYYLSEIKPLHNFLTQLQPFLKLKQKQANLVLKIIEQLPSAKESPDKFLEVCTWVDQIAALNDSKTRKTTSETVRAVLDSLSEKKKSSPAAD

SEQ ID NO: 744 - protein, 167 aa, artificial sequence
  HBV3.3 I-CreI variant
MANTKYNKEFLLYLAGFVDGDGSIIAQIKPNQSCKFKHSLSLTFNVTQKTQRRWFLDKLVDEIGVGYVRDSGSVSRYNLSEIKPLHNFLTQLQPFLKLKQKQANLVLKIIEQLPSAKESPDKFLEVCTWVDQIAALNDSKTRKTTSETVRAVLDSLSEKKKSSPAAD

SEQ ID NO: 745 - protein, 167 aa, artificial sequence
  HBV3.4 I-CreI variant
MANTKYNKEFLLYLAGFVDGDGSIIAQIKPNQSGKFKHYLSLTFKVTQKTQRRWFLDKLVDEIGVGYVYDSGSVSNYYLSEIKPLHNFLTQLQPFLKLKQKQANLVLKIIEQLPSAKESPDKFLEVCTWVDQIAALNDSKTRKTTSETVRAVLDSLSEKKKSSPAAD

SEQ ID NO: 746 - protein, 167 aa, artificial sequence
  HBV3.4 I-CreI variant
MANTKYNKEFLLYLAGFVDGDGSIIAQIKPNQSCKFKHYLSLTFKMTQKTQRRWFLDKLVDEIGVGYVYDSGSVSNYVLSEIKPLHNFLTQLQPFLKLKQKQANLVLKIIEQLPSAKESPDKFLEVCTWVDQIAALNDSKTRKTTSETVRAVLDSLSEKKKSSPAAD

SEQ ID NO: 747 - protein, 167 aa, artificial sequence
  HBV3.4 I-CreI variant
MANTKYNKEFLLYLAGFVDGDGSIIAQIKPNQSGKFKHYLSLTFKMTQKTQRRWFLDKLVDEIGVGYVYDSGSVSNYVLSEIKPLHNFLTQLQPFLKLKQKQANLVLKIIEQLPSAKESPDKFLEVCTWVDQIAALNDSKTRKTTSETVRAVLDSLSEKKKSSPAAD

SEQ ID NO: 748 - protein, 167 aa, artificial sequence
  HBV3.4 I-CreI variant
MANTKYNKEFLLYLAGFVDGDGSIIAQIKPNQSCKFKHYLSLTFKVTQKTQRRWFLDKLVDEIGVGYVYDSGSVSNYYLSEIKPLHNFLTQLQPFLKLKQKQANLVLKIIEQLPSAKESPDKFLEVCTWVDQIAALNDSKTRKTTSETVRAVLDSLSEKKKSSPAAD

SEQ ID NO: 749 - protein, 167 aa, artificial sequence
  HBV3.4 I-CreI variant
MANTKYNKEFLLYLAGFVDGDGSIIAQIKPNQSGKFKHYLSLTFKVTQKTQRRWFLDKLVDEIGVGYVYDSGSVSNYQLSEIKPLHNFLTQLQPFLKLKQKQANLVLKIIEQLPSAKESPDKFLEVCTWVDQIAALNDSKTRKTTSETVRAVLDSLSEKKKSSPAAD

SEQ ID NO: 750 - protein, 167 aa, artificial sequence
  HBV3.4 I-CreI variant
MANTKYNKEFLLYLAGFVDGDGSIIAQIKPNQSCKFKHYLSLTFKVTQKTQRRWFLDKLVDEIGVGYVYDSGSVSNYQLSEIKPLHNFLTQLQPFLKLKQKQANLVLKIIEQLPSAKESPDKFLEVCTWVDQIAALNDSKTRKTTSETVRAVLDSLSEKKKSSPAAD

SEQ ID NO: 751 - DNA, 50 bp, artificial sequence
  HBV3.5 target oligonucleotide
tggcatacaagtttcctgcctacttttgtaaggcaggcaatcgtctgtca

SEQ ID NO: 752 - protein, 167 aa, artificial sequence
  HBV3.5 I-CreI variant
MANTKYNKEFLLYLAGFVDGDGSIIARIKPNQSCKFKHSLSLTFNVTQKTQRRWFLDKLVDEIGVGYVYDSGSVSRYYLSETKPLHNFLTQLQPFLKLKQKQANLVLKIIEQLPSAKESPDKFLEVCTWVDQIAALNDSKTRKTTSETVRAVLDSLSEKKKSSPAAD

SEQ ID NO: 753 - protein, 167 aa, artificial sequence
  HBV3.5 I-CreI variant
MANTKYNKEFLLYLAGFVDGDGSIIAQIKPNQSCKFKHRLSLTFAVTQKTQRRWFLDKLVDEIGVGYVYDSGSVSRYTLSEIKPLHNFLTQLQPFLKLKQKQANLVLKIIEQLPSAKESPDKFLEVCTWVDQVAALNDSKTRKTTSETVRAVLDSLSEKKKSSPAAD

SEQ ID NO: 754 - protein, 167 aa, artificial sequence
  HBV3.5 I-CreI variant
MANTKYNKEFLLYLAGFVDGDGSIIAQIKPNQSCKFKHRLSLTFAVTQKTQRRWFLDKLVDEIGVGYVYDSGSVSRYYLSEIKPLHNFLTQLQPFLKLKQKQANLVLKIIEQLPSAKESPDKFLEVCTWVDQIAALNDSKTRKTTSETVRAVLDSLSEKKKSSPAAD

SEQ ID NO: 755 - protein, 167 aa, artificial sequence
  HBV3.5 I-CreI variant
MANTKYNKEFLLYLAGFVDGDGSIIAQIKPNQSCKFKHRLSLTFAVTQKTQRRWFLDNLVDEIGVGYVYDSGSVSRYYLSGIKPLHNFLTQLQPFLKLKQKQANLVLKIIEQLPSAKESPDKFLEVCTWVDQIAALNDSKTRKTTSETVRAVLDSLSEKKKSSPAAD

SEQ ID NO: 756 - protein, 167 aa, artificial sequence
  HBV3.5 I-CreI variant
MANTKYNKEFLLYLAGFVDGDGSIIAQIKPNQSCKFKHRLSLTFAVTQKTQRRWFLDKLVDEIGVGYVYDSGSVSRYTLSEIKSLHNFLTQLQPFLKLKQKQANLVLKIIEQLPSAKESPDKFLEVCTWVDQIAALNDSKTRKTTSETVRAVLDSLSEKKKSSPAAD

SEQ ID NO: 757 - protein, 167 aa, artificial sequence
  HBV3.5 I-CreI variant
MANTKYNKEFLLYLAGFADGDGSIIAQIKPNQSCKFKHRLSLTFAVTQKTQRRWFLDKLVDEIGVGYVYDSGSVSRYTLSEIKPLHNFLTQLQPFLKLKQKQANLVLKIIEQLPSAKESPDKFLEVCTWVDQIAALNDSKTRKTTSETVRAVLDSLSEKKKSSPAAD

SEQ ID NO: 758 - protein, 167 aa, artificial sequence
  HBV3.5 I-CreI variant
MANTKYNKEFLLYLAGFVDGDGSIIAQIKPNQSCKFKHRLSLTFAVTQKTQRRWFLDKLVDELGVGYVYDSGSVSRYYLSEIKPLHNFLTQLQPFLKLKQKQANLVLKIIEQLPSAKESPDKFLEVCTWVDQIAALNDSKTRKTTSETVRAVLDSLSEKKKSSPAAD

SEQ ID NO: 759 - protein, 167 aa, artificial sequence
  HBV3.5 I-CreI variant
MANTKYNKEFLLYLAGFVDGDGSIIAQIKPNQSCKFKHRLSLTFNVTQKTQRRWFLDKLVDEIGVGYVYDSGPVSRYYLSEIKPLHNFLTQLQPFLKLKQKQANLVLKIIEQLPSAKESPDKFLEVCTWVDQIAALNDSKTRKTTSETVRAVLDSLSEKKKSSPAAD

SEQ ID NO: 760 - DNA, 51 bp, artificial sequence
  HBV3.6 target oligonucleotide
tggcatacaagttttttctcttccttttggaagagaaacaatcgtctgtca

SEQ ID NO: 761 - protein, 167 aa, artificial sequence
  HBV3.6 I-CreI variant
MADTKYNKEFLLYLAGFVDGDGSIIAQIKPNQSSKFKHYLSLTFKVTQKTQRRWFLDKLVDEIGVGYVYDSGSVSNYYLSEIKPLHNFLTQLQPFLKLKQKQANLVLKIIEQLPSAKESPDKFLEVCTWVDQIAALNDSKMRKTTSETVRAVLDSLSEKKKSSPAAD

SEQ ID NO: 762 - protein, 167 aa, artificial sequence
  HBV3.6 I-CreI variant
MANTKYNKEFLLYLAGFVDGDGSIIAQIKPNQSCKFKHYLSLTFKMTQKTQRRWLLDKLVDEIGVGYVYDSGSVSNYYLSEIKPLHNFLTQLQPFLKLKQKQANLVLKIIEQLPSAKESPDKFLEVCTWVDQIAALNDSKTRKTTSETVRAVLDSLSEKKKSSPAAD

SEQ ID NO: 763 - protein, 167 aa, artificial sequence
  HBV3.6 I-CreI variant
MANTKYNKEFLLYLAGFVDGDGSIIAQIKPNQSCKFKHYLSLTFKVTQKTQRRWFLDKLVDEIGIGYVYDSGSVSNYYLSEIKPLRNFLTQLQPFLKLKQKQANLVLKIIEQLPSAKESPDKFLEVCTWVDQIAALNDSKTRKTTSETVRAVLDSLSEKKKSSPAAD

SEQ ID NO: 764 - protein, 167 aa, artificial sequence
  HBV3.6 I-CreI variant
MANTKYNKEFLLYLAGFVDGDGSIIAQIKPNQSCKFKHYLSLTFKMTQKTQRRWFLDKLVDEIGVGYVYDSGSVSNYVLSEIKPLHNFLTQLQPFLKLKQKQANLALKIIEQLPSAKESPDKFLEVCTWVDQIAALNDSKTRKTTSETVRAVLDSLSEKKKSSPAAD

SEQ ID NO: 765 - protein, 167 aa, artificial sequence
  HBV3.6 I-CreI variant
MANTKYNKEFLLYLAGFVDGDGSIIAQIKPNQSCKFKHYLSLTFKMTQKTQRRWFLDKLADEIGVGYVYDSGSVSNYVLSEIKPLHNFLTQLQPFLKLKQKQANLVLKIIEQLPSAKESPDKFLEVCTWVDQIAALNDSKTRKTTSETVRAVLDSLSEKKKSSPAAD

SEQ ID NO: 766 - DNA, 33 bp, artificial sequence
  I132wtF primer
acctgggtggatcagattgcagctctgaacgat

SEQ ID NO: 767 - protein, 167 aa, artificial sequence
  HBV3.6 I-CreI variant
MANTKYNKEFLLYLAGFVDGDGSIIAQIKPNQSCKFKHYLSLTFKMTQKTQRRWFLDKLVDEIGVGYVYDSGSVSNYVLSEIKPLRNFLTQLQPFLKLKQKQANLVLKIIEQLPSAKESPDKFLEVCTWVDQIAALNDSKTRKTTSETVRAVLDSLSEKKKSSPAAD

SEQ ID NO: 768 - protein, 167 aa, artificial sequence
  HBV3.6 I-CreI variant
MANTKYNKEFLLYLAGFVDGDGSIIAQIKPNQSSKFKHYLSLTFKMTQKTQRRWFLDKLVDEIGVGYVYDSGSVSNYVLSEIKPLHTFLTQLQPFLKLKQKQANLVLKIIEQLPSAKESPDKFLEVCTWVDQIAALNDSKTRKTTSETVRAVLDSLSEKKKSSPAAD

SEQ ID NO: 769 - protein, 167 aa, artificial sequence
  HBV3.6 I-CreI variant
MANTKYNKEFLLYLAGFVDGDGSIIAQIKPNQSSKFKHYLSLTFKVTQKTQRRWFLDKLVDEIGVGYVYDSGSVSNYLLSEIKPLHNFLTQLQPFLKLKQKQANLVLKIIEQLPSAKESPDKFLEVCTWVDQIAALNDSKTRKTTSETVRAVLDSLSEKKKSSPAAD

SEQ ID NO: 770 - protein, 167 aa, artificial sequence
  HBV3.6 I-CreI variant
MANTKYNKEFLLYLAGFVDGDGSIIAQIKPNQSCKFKHYLSLTFKVTQKTQRRWFLDELVDEIGVGYVYDSGSVSNYYLSEIKPLHNFLTQLQPFLKLKQKQANLVLKIIEQLPSAKESPDKFLEVCTWVDQIAALNDSKTRKTTSETVRAVLDSLSEKKKSSPAAD

SEQ ID NO: 771 - protein, 167 aa, artificial sequence
  HBV3.6 I-CreI variant
MANTKYNKEFLLYLAGFVDGDGSIIAQIKPNQFCKFKHYLSLTFKMTQKTQRRWFLDKLVDEIGVGYVYDSGSVSNYVLSEIKPLHNFLTQLQPFLKLKQKQANLVLKIIEQLPSAKESPDKFLEVCTWVDQIAALNDSKTRKTTSETVRAVLDSLSEKKKSSPAAD

SEQ ID NO: 772 - protein, 167 aa, artificial sequence
  HBV3.5 I-CreI variant
MANTKYNKEFLLYLAGFVDGDGSIIAQIKPNQSCKFKHRLSLTFAVTQKTQRRWFLDKLVDEIGVGYVYDSGSVSRYYLSEIKPLHNFLTQLQPFLKLKQKQANLVLKIIEQLPSAKESPDKFLEVCTWVDQIAALNDSKTRKTTSETVRAVLDGLSEKKKSSPAAD

SEQ ID NO: 773 - protein, 167 aa, artificial sequence
  HBV3.5 I-CreI variant
MANTKYNKEFLLYLAGFVDGDGSIIAQIKPNQSCKFKHSLSLTFNVTQKTQRRWFLDKLVDEIGVGYVHDSGSVSRYNLREIKPLHNFLTQLQPFLKLKQKQANLVLKIIEQLPSAKESPDKFLEVCTWVDQIAALNDSKTRKTTSETVRAVLDSLSEKKKSSPAAD

SEQ ID NO: 774 - protein, 167 aa, artificial sequence
  HBV3.5 I-CreI variant
MANTKYNKEFLLYLAGFVDGDGSIIAQIKPNHSCKFKHRLSLTFAVTQKTQRRWFLDKLVDEIGVGYVYDSGSVSRYYLSEIKPLHNFLTQLQPFLKLKQKQANLVLKIIEQLPSAKESPDKFLEVCTWVDQIAALNDSKTRKTTSETVRAVLDSLSEKKKSSPAAD

SEQ ID NO: 775 - protein, 167 aa, artificial sequence
  HBV3.6 I-CreI variant
MANTKYNKEFLLYLAGFVDGDGSIIAQIKPNQSCKFKHYLSLTFKMTQKTQRRWFLDKLVDEIGVGYVYDSGSVSNYVLSEIKPLHNFLTQLQPFLKLKQKQANLVLKIIEQLPSAKESPDRFLEVCTWVDQIAALNDSKTRKTTSETVRAVLDSLSEKKKSSPAAD

SEQ ID NO: 776 - protein, 167 aa, artificial sequence
  HBV3.6 I-CreI variant
MANTKYNKEFLLYLAGFVDGDGSIIAQIKPNQSCKFKHYLSLTFKMTQKTQRRWFLDKLVDVIGVGYVYDSGSVSNYVLSEIKPLYNFLTQLQPFLKLKQKQANLVLKIIEQLPSAKESPDKFLEVCTWVDQIAALNDSKTRKTTSETVRAVLDSLSEKKKSSPAAD

SEQ ID NO: 777 - protein, 167 aa, artificial sequence
  HBV3.6 I-CreI variant
MANTKYNKEFLLYLAGFVDGDGSIIAQIKPNQSSKFKHYLSLTFKMTQKTQRRWFLDKLVDEIGVGYVYDSGSVSNYVLSETKPLHNFLTQLQPFLKLKQKQANLVLKIIEQLPSAKESPDKFLEVCTWVDQIAALNDSKTRKTTSETVRAVLDSLSEKKKSSPAAD

SEQ ID NO: 778 - protein, 167 aa, artificial sequence
  HBV3.6 I-CreI variant
MANTKYNKEFLLYLAGFVDGDGSIIAQIKPNRSCKFKHYLSLTFKVTQKTQRRWFLDKLVDEIGVGYVYDSGSASNYVLSEIKPLHNFLTQLQPFLKLKQKQANLVLKIIEQLPSAKESPDKFLEVCTWVDQIAALNDSKTRKTTSETVRAVLDSLSEKKKSSPAAD

SEQ ID NO: 779 - protein, 167 aa, artificial sequence
  HBV3.6 I-CreI variant
MASTKYNKEFLLYLAGFVDGDGSIIAQIKPNQSCKFKHYLSLTFKVTQKTQRRWFLDKLVDEIGVGYVYDSGSVSNYYLSEIKPLHNFLAQLQPFLKLKQKQANLVLKIIEQLPSAKESPDKFLEVCTWVDQIAALNDSKTRKTTSETVRAVLDSLSEKKKSSPAAD

SEQ ID NO: 780 - protein, 167 aa, artificial sequence
  HBV3 I-CreI variant
MANTKYNKEFLLYLAGFVDSDGSIIAQIKPNQSCKFKHYLSLTFKVTQKTQRRWFLDKLVDEIGVGYVYDSGSVSNYQLSEIKPLHNFLTQLQPFLELKQKQANLVLKIIEQLPSAKESPDKFLEVCTWVDQIAALNDSKMRKTTSETVRAVLDSLSEKKKSSPAAD

SEQ ID NO: 781 - protein, 167 aa, artificial sequence
  HBV3 I-CreI variant
MANTKYNKEFLLYLAGFVDSDGSIIAQIKPNQSCKFKHYLSLTFKVTQKTQRRWFLDKLVDEIGVGYVYDSGSVSNYYLSEIKPLHNFLTQLQPFLKLKQKQANLVLKIIEQLPSAKESPDKFLEVCTWVDQIAALNDSKTRKTTSETVRAVLDSLSEKKKSSPAAD

SEQ ID NO: 782 - protein, 167 aa, artificial sequence
  HBV3 I-CreI variant
MANTKYNKEFLLYLAGFVDSDGSIIAQIKPNQSCKFKHYLSLTFKVTQKTQRRWFLDKLVDEIGVGYVYDSGSVSNYQLSEIKPLHNFLTQLQPFLKLKQKQANLVLKIIEQLPSAKESPDKFLEVCTWVDQIAALNDSKMRKTTSETVRAVLDSLSEKKKSSPAAD

SEQ ID NO: 783 - protein, 167 aa, artificial sequence
  HBV3 I-CreI variant
MANTKYNKEFLLYLAGFVDSDGSIIAQIKPNQSCKFKHRLSLTFKVTQKTQRRWFLDKLVDEIGVGYVYDSGSVSNYQLSEIKPLHNFLTQLQPFLKLKQKQANLVLKIIEQLPSAKESPDKFLEVCTWVDQMAALNDSKTRKTTSETVRAVLDSLSEKKKSSPAAD

SEQ ID NO: 784 - protein, 167 aa, artificial sequence
  HBV3 I-CreI variant
MANTKYNKEFLLYLAGFVDSDGSIIAQIKPNQSCKFKHYLSLTFKVTQKTQRRWFLDKLVDEIGVGYVYDSGSVSNYQLSEIKPLHNFLTQLQPFLKLKQKQANLVLKIIEQLPSAKESPDKFLEVCTWVDQIAALNDSKTRKTTSETVRAVLDSLSEKKKSSPAAD

SEQ ID NO: 785 - protein, 167 aa, artificial sequence
  HBV3 I-CreI variant
MANTKYNKEFLLYLAGFVDSDGSIIAQIKPNQSCKFKHYLSLTFKVTQKTQRRWFLDKLVDGIGVGYVYDSGSVSNYQLSEIKPLHNFLTQLQPFLKLKQKQANLVLKIIEQLPSAKESPDKFLEVCTCVDQIAALNDSKTRKTTSETVRAVLDSLSEKKKSSPAAD

SEQ ID NO: 786 - protein, 167 aa, artificial sequence
  HBV3 I-CreI variant
MANTKYNKEFLLYLAGFVDGDGSVIARIKPNQSCKFKHSLSLTFNVTQKTQRRWFLDKLVDEIGVGYVYDSGSVSRYYLSETKPLHNFLTQLQPFLKLKQKQANLVLKIIEQLPSAKESPDKFLEVCTWVDQIAALNDSKTRKTTSETVRAVLDSLSEKKKSSPAAD

SEQ ID NO: 787 - protein, 167 aa, artificial sequence
  HBV3 I-CreI variant
MANTKYNKEFLLYLAGFVDGDGSIIAQIKPNQSCRFKHRLSLTFAVTQKTQRRWFLDKLVDEIGVGYVYDSGSVSRYTLSETKSLHNFLTQLQPFLKLKQKQANLVLKIIEQLPSAKESPDKFLEVCTWVDQIAALNDSKTRKTTSETVRAVLDSLSEKKKSSPAAD

SEQ ID NO: 788 - protein, 354 aa, artificial sequence
  SCOH-HBV12-B1
MANTKYNEEFLLYLAGFVDGDGSIFAQIKPNQQYKFKHCLSLTFDVTQKTQRRWFLDKLVDEIGVGYVYDSGSVSSYRLSKIKPLHNFLTQLQPFLELKQKQANLVLKIIEQLPSAKESPDKFLEVCTWVDQIAALNDSKTRKTTSETVRAVLDSLSEKKKSSPAAGGSDKYNQALSKYNQALSKYNQALSGGGGSNKKFLLYLAGFVDSDGSIIAQIKPNQHCKFKHQLRLTFRVTQKTQRRWFLDKLVDRIGVGYVYDSGSVSNYQLSEIKPLHNFLTQLQPFLKLKQKQANLVLKIIEQLPSAKESPDKFLEVCTWVDQIAALNDSKTRKTTSETVRAVLDSLSEKKKSSP

SEQ ID NO: 789 - protein, 167 aa, artificial sequence
  HBV3 I-CreI variant
MANTKYNKEFLLYLAGFVDGDGSIIARIKPNQSCKFKHSLSLTFNVTQKTQRRWFLDKLVDEIGVGYVYDSGSVSRYYLSETKPLHNFLTQLQPFLKLKQKQANLVLKIIEQLPSAKESPDKFLEVCTWVGQIAALNDSKTRKTTSETVRAVLDSLSEKKKSSPAAD

SEQ ID NO: 790 - protein, 167 aa, artificial sequence
  HBV3 I-CreI variant
MANTKYNKEFLLYLAGFVDGDGSIIARIKPNQSCKFKHSLSLTFNVTQKTQRRRFLDKLVDEIGVGYVYDSGSVSRYYLSETKPLHNFLAQLQPFLKLKQKQANLVLKIIEQLPSAKESPDKFLEVCTWVDQIAALNDSKTRKTTSETVRAVLDSLSEKKKSSPAAD

SEQ ID NO: 791 - protein, 167 aa, artificial sequence
  HBV3 I-CreI variant
MANTKYNKEFLLYLAGFVDGDGSIIARIKPNQSCKFKHSLSLTFNVTQKTQRRWFLDKLVDEIGVGYVYDSGSVSRYYLSETKPLHNFLTQLQPFLKLKQKQANLVLKIIEQLPSAKESPDKFLEVCTWVDQIAALNDSRTRKTTSETVRAVLDSLSEKKKSSPAAD

SEQ ID NO: 792 - protein, 167 aa, artificial sequence
  HBV3 I-CreI variant
MANTKYNKEFLLYLAGFVDGDGSIIARIKPNQSCKFKHSLSLTFNVTQKTQRRWFLGKLVDEIGVGYVYDSGSVSRYYLSETKPLHNFLTQLQPFLKLKQKQANLVLKIIEQLPSAKESPDKFLEVCTWVDQIAALNDSKTRKTTSETVRAVLDSLSEKKKSSPAAD

SEQ ID NO: 793 - protein, 167 aa, artificial sequence
  HBV3.3_R5 I-CreI variant
MANTKYNKEFLLYLAGFVDGDGSIIARIKPNQSCKFKHSLSLTFNVTQKTQRRWFLDKLVDEIGVGYVYDSGSVSRYYLSETKPLHNFLTQLQPFLKLKQKQANLALKIIEQLPSAKESPDKFLEVCTWVDQVAALNDSRTRKTTSETVRAVLDSLSEKKKSSPAAD

SEQ ID NO: 794 - protein, 167 aa, artificial sequence; identical to SEQ ID NO: 782
  HBV3.4_A7 I-CreI variant

SEQ ID NO: 795 - protein, 167 aa, artificial sequence
  HBV3.4_R2 I-CreI variant
MANTKYNKEFLLYLAGFVDSDGSIIAQIKPNQSCKFKHYLSLTFKVTQKTQRRWLLDKLVDEIGVGYVYDSGSVSNYQLSEIKPLHNFLTQLQPFLKLKQKQANLALKIIEQLPSAKESPDKFLEVCTWVDQIAALNDSKMRKTTSETVRAVLDSLSEKKKSSPAAD

SEQ ID NO: 796 - protein, 167 aa, artificial sequence
  HBV3.4_R4 I-CreI variant
MANTKYNKEFLLYLAGFVDSDGSIIAQIKPNQSCKFKHYLSLTFKVTQKTQRRWFLDKLVDEIGVGYVYDSGSVSNYQLSEIKPLHNFLTQLQPFLKLKQKQANLALKIIEQLPSAKESPDKFLEVCTWVDQIAALNDSKMRKTTSETVRAVLDSLSEKKKSSPAAD

SEQ ID NO: 797 - protein, 167 aa, artificial sequence
  HBV3.4_R5 I-CreI variant
MANTKYNKEFLLYLAGFVDSDGSIIAQIKPNQSCKFKHYLSLTFKVTQKTQRRWFLDKLVDEIGVGYVYDSGSVSNYQLSEIKPLHNFLTQLQPFLKLKQKQANLALKIIEQLPSAKESPDKFLEVCTWVDQVAALNDSKMRKTTSETVRAVLDSLSEKKKSSPAAD

SEQ ID NO: 798 - protein, 167 aa, artificial sequence
  HBV3.4_R6 I-CreI variant
MANTKYNKEFLLYLAGFVDSDGSIIAQIKPNQSCKFKHYLSLTFKVTQKTQRRWFLDKLVDEIGVGYVYDSGSVSNYQLSEIKPLHNFLTQLQPFLKLKQKQANLVLKIIEQLPSAKESPDKFLEVCTWVDQVAALNDSKMRKTTSETVRAVLDSLSEKKKSSPAAD

SEQ ID NO: 799 - protein, 354 aa, artificial sequence
  single chain SC_34
MANTKYNKEFLLYLAGFVDGDGSIIARIKPNQSCKFKHSLSLTFNVTQKTQRRWFLDKLVDEIGVGYVYDSGSVSRYYLSETKPLHNFLTQLQPFLKLKQKQANLALKIIEQLPSAKESPDKFLEVCTWVDQVAALNDSRTRKTTSETVRAVLDSLSEKKKSSPAAGGSDKYNQALSKYNQALSKYNQALSGGGGSNKEFLLYLAGFVDSDGSIIAQIKPNQSCKFKHYLSLTFKVTQKTQRRWFLDKLVDEIGVGYVYDSGSVSNYQLSEIKPLHNFLTQLQPFLKLKQKQANLALKIIEQLPSAKESPDKFLEVCTWVDQIAALNDSKMRKTTSETVRAVLDSLSEKKKSSP

SEQ ID NO: 800 - protein, 354 aa, artificial sequence
  single chain SC_OH_34
MANTKYNEEFLLYLAGFVDGDGSIIARIKPNQSCKFKHSLSLTFNVTQKTQRRWFLDKLVDEIGVGYVYDSGSVSRYYLSETKPLHNFLTQLQPFLELKQKQANLALKIIEQLPSAKESPDKFLEVCTWVDQVAALNDSRTRKTTSETVRAVLDSLSEKKKSSPAAGGSDKYNQALSKYNQALSKYNQALSGGGGSNKKFLLYLAGFVDSDGSIIAQIKPNQSCKFKHYLSLTFKVTQKTQRRWFLDKLVDRIGVGYVYDSGSVSNYQLSEIKPLHNFLTQLQPFLKLKQKQANLALKIIEQLPSAKESPDKFLEVCTWVDQIAALNDSKMRKTTSETVRAVLDSLSEKKKSSP

SEQ ID NO: 801 - DNA, 33 bp, artificial sequence
  F54wtF primer
acccagcgccgttggtttctggacaaactagtg

SEQ ID NO: 802 - DNA, 33 bp, artificial sequence
  V105wtR primer
ttcgataattttcagaaccaggtttgcctgttt

SEQ ID NO: 803 - DNA, 51 bp, artificial sequence
  HBV12 target oligonucleotide
tggcatacaagtttatattcttgggaacaagagctacacaatcgtctgtca

SEQ ID NO: 804 - protein, 354 aa, artificial sequence
  SCOH-HBV12-B2
MANTKYNEEFLLYLAGFVDGDGSIFAQIKPNQQYKFKHCLSLTFDVTQKTQRRWFLDKLVDEIGVGYVYDSGSVSSYRLSKIKPLHNFLTQLQPFLELKQKQANLVLKIIEQLPSAKESPDKFLEVCTWVDQVAALNDSKTRKTTSETVRAVLDSLSEKKKSSPAAGGSDKYNQALSKYNQALSKYNQALSGGGGSNKKFLLYLAGFVDSDGSIIAQIKPNQHCKFKHQLRLTFRVTQKTQRRWFLDKLVDRIGVGYVYDSGSVSNYQLSEIKPLHNFLTQLQPFLKLKQKQANLVLKIIEQLPSAKESPDKFLEVCTWVDQIAALNDSKTRKTTSETVRAVLDSLSEKKKSSP

SEQ ID NO: 805 - protein, 354 aa, artificial sequence
  SCOH-HBV12-B3
MANTKYNEEFLLYLAGFVDGDGSIIAQIKPSQRSKFKHQLSLTFDVTQKTQRRWFLDKLVDEIGVGYVYDSGSVSSYRLSEIKPLHNFLTQLQPFLELKQKQANLVLKIIEQLPSAKESPDKFLEVCTWVDQIAALNDSKTRKTTSETVRAVLDSLSEKKKSSPAAGGSDKYNQALSKYNQALSKYNQALSGGGGSNKKFLLYLAGFVDSDGSIIAQIKPNQHCKFKHQLRLTFRVTQKTQRRWFLDKLVDRIGVGYVYDSGSVSNYQLSEIKPLHNFLTQLQPFLKLKQKQANLVLKIIEQLPSAKESPDKFLEVCTWVDQIAALNDSKTRKTTSETVRAVLDSLSEKKKSSP

SEQ ID NO: 806 - DNA, 24 bp, artificial sequence
  Rag target
ttgttctcaggtacctcagccaga

SEQ ID NO: 807 - DNA, 31 bp, artificial sequence
  HBV12-For oligonucleotide
ctagctgtagctcttgttcccaagaatattg

SEQ ID NO: 808 - DNA, 30 bp, artificial sequence
  HBV12-Rev oligonucleotide
ctagcatattcttgggaacaagagctacag

SEQ ID NO: 809 - DNA, 30 bp, artificial sequence
  SCEI-For oligonucleotide
ctagcacgctagggataacagggtaatatg

SEQ ID NO: 810 - DNA, 30 bp, artificial sequence
  SCEI-Rev oligonucleotide
ctagcatattaccctgttatccctagcgtg

SEQ ID NO: 811 - DNA, 418 bp, artificial sequence
  hAAT promoter
ggatcttgctaccagtggaacagccactaaggattctgcagtgagagcagagggccagctaagtggtactctcccagagactgtctgactcacgccaccccctccaccttggacacaggacgctgtggtttctgagccaggtacaatgactcctttcggtaagtgcagtggaagctgtacactgcccaggcaaagcgtccgggcagcgtaggcgggcgactcagatcccagccagtggacttagcccctgtttgctcctccgataactggggtgaccttggttaatattcaccagcagcctcccccgttgcccctctggatccactgcttaaatacggacgaggacagggccctgtctcctcagcttcaggcaccaccactgacctgggacagtgaatgatccccctgatctgcggcc

SEQ ID NO: 812 - DNA, 282 bp, artificial sequence
  bpA
cccgggggatcagcctcgactgtgccttctagttgccagccatctgttgtttgcccctcccccgtgccttccttgaccctggaaggtgccactcccactgtcctttcctaataaaatgaggaaattgcatcgcattgtctgagtaggtgtcattctattctggggggtggggtggggcaggacagcaagggggaggattgggaagacaatagcaggcatgctggggatgcggtgggctctatggcttctgaggcggaaagaaccagctggggctcgagatcc

SEQ ID NO: 813 - DNA, 328 bp, artificial sequence
  ApoE-HCR
caggctcagaggcacacaggagtttctgggctcaccctgcccccttccaacccctcagttcccatcctccagcagctgtttgtgtgctgcctctgaagtccacactgaacaaacttcagcctactcatgtccctaaaatgggcaaacattgcaagcagcaaacagcaaacacacagccctccctgcctgctgaccttggagctggggcagaggtcagagacctctctgggcccatgccacctccaacatccactcgaccccttggaatttcggtggagaggagcagaggttgtcctggcgtggtttaggtagtgtgagagggtccggg

SEQ ID NO: 814 - DNA, 1438 bp, artificial sequence
  factor IX first intron
gtttgtttccttttttaaaatacattgagtatgcttgccttttagatatagaaatatctgatgctgtcttcttcactaaattttgattacatgatttgacagcaatattgaagagtctaacagccagcacgcaggttggtaagtactggttctttgttagctaggttttcttcttcttcatttttaaaactaaatagatcgacaatgcttatgatgcatttatgtttaataaacactgttcagttcatgatttggtcatgtaattcctgttagaaaacattcatctccttggtttaaaaaaattaaaagtgggaaaacaaagaaatagcagaatatagtgaaaaaaaataaccacattatttttgtttggacttaccactttgaaatcaaaatgggaaacaaaagcacaaacaatggccttatttacacaaaaagtctgattttaagatatatgacatttcaaggtttcagaagtatgtaatgaggtgtgtctctaattttttaaattatatatcttcaatttaaagttttagttaaaacataaagattaacctttcattagcaagctgttagttatcaccaaagcttttcatggattaggaaaaaatcattttgtctctatgtcaaacatcttggagttgatatttggggaaacacaatactcagttgagttccctaggggagaaaagcaagcttaagaattgacataaagagtaggaagttagctaatgcaacatatatcactttgttttttcacaactacagtgactttatgtatttcccagaggaaggcatacagggaagaaattatcccatttggacaaacagcatgttctcacaggaagcatttatcacacttacttgtcaactttctagaatcaaatctagtagctgacagtaccaggatcaggggtgccaaccctaagcacccccagaaagctgactggccctgtggttcccactccagacatgatgtcagctgtgaaatcgacgtcgctggaccataattaggcttctgttcttcaggagacatttgttcaaagtcatttgggcaaccatattctgaaaacagcccagccagggtgatggatcactttgcaaagatcctcaatgagctattttcaagtgatgacaaagtgtgaagttaaccgctcatttgagaactttctttttcatccaaagtaaattcaaatatgattagaaatctgaccttttattactggaattctcttgactaaaagtaaaattgaattttaattcctaaatctccatgtgtatacagtactgtgggaacatcacagattttggctccatgccctaaagagaaattggctttcagattatttggattaaaaacaaagactttcttaagagatgtaaaattttcatgatgttttcttttttgctaaaactaaagaattattcttttacatttcag

1. An I-CreI variant, capable of cleaving a DNA target in a genome of a pathogenic non-integrating virus (NIV.

2. The variant of claim 1, wherein the pathogenic NIV is from a genus selected from the group consisting of Herpesviridae, Adenoviridae, Papovaviridae, Poxyiridae, Parvoviridae, and Hepadnaviridae.

3. The variant of claim 1, wherein the pathogenic NIV is selected from the group consisting of herpes simplex virus 1, herpes simplex virus 2, herpes simplex virus 3, Varicella zoster virus, Epstein-Barr virus, Cytomegalovirus, Herpes lymphotropic virus, Roseolovirus, Rhadinovirus, Adenovirus, Papillomavirus, Polyomavirus, variola virus, vaccinia virus, cowpox virus, monkeypox virus, camel pox, variola virus, vaccinia virus, cowpox virus, monkeypox virus, tanapox virus, yaba monkey tumor virus, molluscum contagiosum virus, Parvovirus B19, and hepatitis B.

4. The variant of claim 1, comprising the amino acid sequence of SEQ ID NO: 256.

5. The variant of claim 1, wherein a nucleotide sequence of the DNA target is selected from the group consisting of the sequences SEQ ID NO: 8 to 13; 17 to 24; 472; 477 to 482; 487 to 492; 497 to 502; 507 to 510; 616 to 619; 685 to 688; and 723 to 728.

6. The variant of claim 1,
wherein an amino acid sequence of at least one of two I-CreI monomers comprises one of the sequences selected from the group consisting of SEQ ID NO: 25 to 36; 40 to 90; 93 to 151; 153 to 168; 171 to 246; 249 to 252; 267 to 273; 275 to 288; 290 to 433; 436 to 445; 455 to 463; 470 to 471; 511 to 521; 522 to 531; 541 to 554; 592 to 605; 621 to 626; 628 to 633; 635 to 647; 665 to 678; 690 to 697; 699 to 702; 705 to 715; 730 to 734; 736 to 740; 743 to 750; 752 to 759; 761 to 765; 767 to 771; and 780 to 798;

7. The variant of claim 1, wherein the variant is a single chain meganuclease comprising an amino acid sequence selected from the group consisting of SEQ ID NO: 253 to 255; 267 to 261; 446 to 454; 465 to 466; 532 to 535; 556 to 568; 571 to 580; 583 to 590; 607 to 612; 788; 799 to 800; and 804 to 805.

8. The variant of claim 1,
wherein at least one of two I-CreI monomers comprises at least two substitutions: one substitution in a first functional subdomain of a LAGLIDADG core domain from positions 26 to 40 of I-CreI and one substitution in a second functional subdomain of a LAGLIDADG core domain from positions 44 to 77 of I-CreI,
the variant is capable of cleaving a sequence of the DNA target from the genome of the NIV, and
the variant is obtained by a method comprising at least:
(a) constructing a first series of I-CreI variants comprising at least one substitution in the first functional subdomain in at least one position selected from the group consisting of 26, 28, 30, 32, 33, and 38 of I-CreI;
(b) constructing a second series of I-CreI variants comprising at least one substitution in the second functional subdomain in at least one position selected from the group consisting of 44, 68, 70, 75 or 77 of I-CreI;
(c) selecting, screening, or selecting and screening a variant from the first series which is capable of cleaving a mutant I-CreI site wherein at least one of
(i) a nucleotide triplet in positions −10 to −8 of the I-CreI site is replaced with a nucleotide triplet position −10 to −8 of the sequence of the DNA target and
(ii) a nucleotide triplet in positions +8 to +10 is replaced with a reverse complementary sequence of the nucleotide triplet in position −10 to −8 of the sequence of the DNA target;
(d) selecting, screening, or selecting and screening a variant from the second series which is capable of cleaving a mutant I-CreI site wherein at least one of
(i) a nucleotide triplet in positions −5 to −3 of the I-CreI site is replaced with a nucleotide triplet in position −5 to −3 of the sequence of the DNA target and
(ii) a nucleotide triplet in positions +3 to +5 is replaced with a reverse complementary sequence of the nucleotide triplet in position −5 to −3 of the sequence of the DNA target;
(e) selecting, screening, or selecting and screening a variant from the first series which is capable of cleaving a mutant I-CreI site wherein at least one of
(i) the nucleotide triplet in positions +8 to +10 of the I-CreI site is replaced with a nucleotide triplet in position +8 to +10 of the sequence of the DNA target and
(ii) the nucleotide triplet in positions −10 to −8 is replaced with a reverse complementary sequence of the nucleotide triplet in position +8 to +10 of the sequence of the DNA target;
(f) selecting, screening, or selecting and screening a variant from the second series which is capable of cleaving a mutant I-CreI site wherein at least one of
(i) the nucleotide triplet in positions +3 to +5 of the I-CreI site is replaced with a nucleotide triplet in position +3 to +5 of the sequence of the DNA target and
(ii) the nucleotide triplet in positions −5 to −3 has been replaced with a reverse complementary sequence of the nucleotide triplet in position +3 to +5 of the sequence of the DNA target;
(g) combining, in a single variant, the at least one substitution in at least one position selected from the group consisting of 44, 68, 70, 75 and 77 of two variants from (c) and (d), thereby obtaining a novel homodimeric I-CreI variant capable of cleaving a nucleotide sequence wherein
(i) the nucleotide triplet in position −10 to −8 is identical to the nucleotide triplet in position −10 to −8 of the sequence of the DNA target,
(ii) the nucleotide triplet in position +8 to +10 is identical to the reverse complementary sequence of the nucleotide triplet in position −10 to −8 of the sequence of the DNA target,
(iii) the nucleotide triplet in position −5 to −3 is identical to the nucleotide triplet in position −5 to −3 of the sequence of the DNA target, and
(iv) the nucleotide triplet in position +3 to +5 is identical to the reverse complementary sequence of the nucleotide triplet in position −5 to −3 of the DNA target;
(h) combining, in a single variant, the at least one substitution in at least one position selected from the group consisting of 44, 68, 70, 75, and 77 of two variants from (e) and (f), thereby obtaining a novel homodimeric I-CreI variant capable of cleaving a nucleotide sequence wherein
(i) the nucleotide triplet in position +8 to +10 of the I-CreI site is identical to the nucleotide triplet in position +8 to +10 of the sequence of the DNA target and
(ii) the nucleotide triplet in position −10 to −8 is identical to the reverse complementary sequence of the nucleotide triplet in position +8 to +10 of the sequence of the DNA target,
(iii) the nucleotide triplet in position +3 to +5 is identical to the nucleotide triplet in positions position +3 to +5 of the sequence of the DNA target, and
(iv) the nucleotide triplet in position −5 to −3 is identical to the reverse complementary sequence of the nucleotide triplet in position +3 to +5 of the sequence of the DNA target;
(i) combining the variant obtained in (g) and the variant obtained in (h) to form a, heterodimer; and
(j) selecting, screening, or selecting and screening a heterodimer from (i) which is capable of cleaving the DNA target sequence from the NIV genome.

9. A kit, comprising:
the variant of claim 1, and
another anti-viral medicament.

10. A polynucleotide fragment encoding the variant of claim 1.

11. An expression vector comprising the polynucleotide fragment of claim 10.

12. A host cell modified by the polynucleotide of claim 10.

13. A non-human transgenic animal modified by the polynucleotide of claim 10.

14. A method of non-therapeutic genome engineering, comprising:
cleaving a DNA target with the variant of claim 1.

15. A kit for treating a NIV infection, comprising a solution, comprising:
the I-CreI variant of claim 1; and
a pharmaceutically acceptable preservative.

16. A host cell modified by the vector of claim 11.

17. A non-human transgenic animal modified by the vector of claim 11.

18. A kit for treating a NIV infection, comprising a solution, comprising:
the nucleotide molecule of claim 10; and
a pharmaceutically acceptable preservative.
